(19) United States
(12) Patent Application Publication
(10) Pub. No.: US 2025/0231185 A1
(43) Pub. Date: Jul. 17, 2025

(54) Coronavirus T Cell Epitopes, Megapools and Uses Thereof

(71) Applicant: La Jolla Institute for Immunology, La Jolla, CA (US)

(72) Inventors: Alessandro Sette, La Jolla, CA (US); Shane Crotty, La Jolla, CA (US); Bjoern Peters, La Jolla, CA (US); John Sidney, La Jolla, CA (US); Alba Grifoni, La Jolla, CA (US); Daniela Weiskopf, La Jolla, CA (US); Ricardo Da Silva Antunes, La Jolla, CA (US)

(21) Appl. No.: 18/555,376

(22) PCT Filed: May 12, 2022
(86) PCT No.: PCT/US2022/028982

§ 371 Date: Oct. 23, 2023

Related U.S. Application Data
(60) Provisional application No. 63/188,220, filed on May 13, 2021.
(60) Provisional application No. 63/286,537, filed on Dec. 6, 2021.
(60) Provisional application No. 63/293,229, filed on Dec. 23, 2021.

(51) Int. Cl. G01N 33/569; C07K 14/005; C07K 14/74; G01N 33/50; G01N 33/68

(52) U.S. Cl. CPC G01N 33/56972; C07K 14/005; C07K 14/70539; G01N 33/505; G01N 33/56983; G01N 33/6863; G01N 33/6878; C07K 2319/00; C12N 2770/20022; G01N 2333/165; G01N 2333/70539; G01N 2333/715

(57) ABSTRACT

The present disclosure includes compositions and methods for detecting the presence of: a coronavirus or an immune response relevant to a coronavirus infection including T cells responsive to one or more coronavirus peptides or proteins comprising, consisting of, or consisting essentially of: one or more amino acid sequences selected from those sequences set forth in Tables 1 to 10 (SEQ ID NOS: 1 to 3522), or a subsequence, portion, homologue, variant or derivative thereof; a fusion protein; a pool of 2 or more peptides; or a polynucleotide that encodes one or more peptides or proteins, comprising, consisting of, or consisting essentially of one or more amino acid sequences set forth in Tables 1 to 10 (SEQ ID NOS: 1 to 3522), or a subsequence, portion, homologue, variant or derivative thereof. The disclosure further provides vaccines, diagnostics, therapies, and kits, comprising such proteins or peptides.

### CROSS-REFERENCE TO RELATED APPLICATIONS

[0001] This application is a National Stage of International Application No. PCT/US2022/028982, filed May 12, 2022, which claims the benefit of U.S. Provisional Application Ser. No. 63/188,220, filed May 13, 2021, 63/286,537, filed Dec. 7, 2021, and 63/293,229, filed Dec. 23, 2021. The contents of each of which are incorporated by reference in their entirety.

### STATEMENT OF FEDERALLY FUNDED RESEARCH

[0002] This invention was made with government support under grant and contract numbers U19 AI142742, 75N93019C00065, and 75N93019C00001 awarded by the National Institutes of Health/NIAID. The government has certain rights in the invention.

### TECHNICAL FIELD OF THE INVENTION

[0003] The present invention relates in general to the field of peptides that are T cell epitopes for coronavirus, and more particularly, to compositions and methods for the prevention, treatment, diagnosis, kits, and uses of such T cell epitopes.

### INCORPORATION-BY-REFERENCE OF MATERIALS FILED ON COMPACT DISC

[0004] The present application includes a Sequence Listing which has been submitted in ASCII format via EFS-Web and is hereby incorporated by reference in its entirety. Said ASCII copy, created on Jun. 23, 2022, is named LJII2014WO_ST25.txt and is 717,449 bytes in size.

### BACKGROUND OF THE INVENTION

[0005] Without limiting the scope of the invention, its background is described in connection with coronaviruses.

[0006] As of April 2022, SARS-CoV-2 infections are associated with more than 6.15 million deaths and over 491 million cases worldwide, and over 80 million cases in the United States alone (coronavirus.jhu.edu/map.html). The severity of the associated Coronavirus Disease 2019 (COVID-19) ranges from asymptomatic or mild self-limiting disease, to severe pneumonia and acute respiratory distress syndrome (WHO; www.who.int/publications/i/item/clinical-management-of-covid-19). The present inventors and others have started to delineate the role of SARS-CoV-2-specific T cell immunity in COVID-19 clinical outcomes (Altmann and Boyton, 2020; Braun et al., 2020; Grifoni et al., 2020; Le Bert et al., 2020; Meckiff et al., 2020; Rydyznski Moderbacher et al., 2020; Sekine et al., 2020; Weiskopf et al., 2020). A growing body of evidence points to a key role for SARS-CoV-2-specific T cell responses in COVID-19 disease resolution and modulation of disease severity (Rydyznski Moderbacher et al., 2020; Schub et al., 2020; Weiskopf et al., 2020). Milder cases of acute COVID-19 were associated with coordinated antibody, CD4+ and CD8+ T cell responses, whereas severe cases correlated with a lack of coordination of cellular and antibody responses, and delayed kinetics of adaptive responses (Rydyznski Moderbacher et al., 2020; Weiskopf et al., 2020). Now, the emergence of SARS-CoV-2 variants highlights the better need to better understand adaptive immune responses to this virus.

[0007] Despite these advances, and in light of variants of SARS-CoV-2 being identified globally, a need remains for identifying T cell epitopes for use in diagnostics, treatments, vaccines, kits, etc.

### SUMMARY OF THE INVENTION

[0008] As embodied and broadly described herein, an aspect of the present disclosure relates to a composition comprising: one or more peptides or proteins, comprising, consisting of, or consisting essentially of an amino acid sequence selected from those sequences set forth in Tables 1 to 10 (SEQ ID NOS: 1 to 3522), or a subsequence, portion, homologue, variant or derivative thereof, a fusion protein comprising one or more amino acid sequences selected from those sequences set forth in Tables 1 to 10 (SEQ ID NOS: 1 to 3522); or a pool of 2 or more peptides comprising, consisting of, or consisting essentially of amino acid sequences selected from those sequences set forth in Tables 1 to 10 (SEQ ID NOS: 1 to 3522); or a polynucleotide that encodes one or more peptides or proteins, comprising, consisting of, or consisting essentially of an amino acid sequence selected from those sequences set forth in Tables 1 to 10 (SEQ ID NOS: 1 to 3522), or a subsequence, portion, homologue, variant or derivative thereof. In one aspect, the one or more peptides or proteins comprises, or wherein the fusion protein comprises 2 or more or more amino acid sequences selected from those sequences set forth in Tables 1 to 10 (SEQ ID NOS: 1 to 3522), or a subsequence, portion, homologue, variant or derivative thereof. In another aspect, the amino acid sequence is selected from a coronavirus T cell epitope selected from those sequences set forth in Tables 1, 2, 3, 4, 5, 6, 7, 8, 9, or 10 (SEQ ID NOS: 1 to 3522). In another aspect, the composition comprises one or more SARS-CoV-2 peptides amino acid sequences selected from those sequences set forth in Tables 1 to 10 (SEQ ID NOS: 1 to 3522), or a subsequence, portion, homologue, variant or derivative thereof, a fusion protein comprising one or more amino acid sequences selected from those sequences set forth in Tables 1 to 10 (SEQ ID NOS: 1 to 3522); or a pool of 2 or more peptides selected from those sequences set forth in Tables 1 to 10 (SEQ ID NOS: 1 to 3522); or a polynucleotide that encodes one or more peptides or proteins, comprising, consisting of, or consisting essentially of an amino acid sequence selected from those sequences set forth in Tables 1 to 10 (SEQ ID NOS: 1 to 3522), or a subsequence, portion, homologue, variant or derivative thereof. In another aspect, the peptide or protein comprises a coronavirus T cell epitope. In another aspect, the wherein the one or more peptides or proteins comprises a coronavirus CD8+ or CD4+ T cell epitope. In another aspect, the coronavirus is SARS-CoV-2 and the SARS-CoV-2 T cell epitope is not conserved in another coronavirus. In another aspect, the coronavirus is SARS-CoV-2 and the SARS-CoV-2 T cell epitope is conserved in another coronavirus. In another aspect, the one or more peptides or proteins has a length from about 9-15, 15-20, 20-25, 25-30, 30-40, 40-50, 50-75 or 75-100 amino acids. In another aspect, the one or more peptides or proteins elicits, stimulates, induces, promotes, increases or enhances a T cell response to a coronavirus. In another aspect, the one or more peptides or proteins that elicits, stimulates, induces, promotes, increases or enhances the T cell response to the coronavirus is a coronavirus spike, nucleoprotein, membrane, replicase polyprotein lab, protein 3a, envelope small membrane protein, non-structural protein 3b, protein 7a, protein 9b, non-structural protein 6, or non-structural protein 8a protein or peptide, or a variant, homologue, derivative or subsequence thereof. In another aspect, the composition further comprises formulating the one or more peptides or proteins into an immunogenic formulation with an adjuvant. In another aspect, the adjuvant is selected from the group consisting of adjuvant is selected from the group consisting of alum, aluminum hydroxide, aluminum phosphate, calcium phosphate hydroxide, cytosine-guanosine oligonucleotide (CpG-ODN) sequence, granulocyte macrophage colony stimulating factor (GM-CSF), monophosphoryl lipid A (MPL), poly(I:C), MF59, Quil A, N-acetyl muramyl-L-alanyl-D-isoglutamine (MDP), FIA, montanide, poly (DL-lactide-coglycolide), squalene, virosome, AS03, ASO4, IL-1, IL-2, IL-3, IL-4, IL-5, IL-6, IL-7, IL-8, IL-10, IL-12, IL-15, IL-17, IL-18, STING, CD40L, pathogen-associated molecular patterns (PAMPs), damage-associated molecular pattern molecules (DAMPs), Freund's complete adjuvant, Freund's incomplete adjuvant, transforming growth factor (TGF)-beta antibody or antagonists, A2aR antagonists, lipopolysaccharides (LPS), Fas ligand, Trail, lymphotactin, Mannan (M-FP), APG-2, Hsp70 and Hsp90, pattern recognition receptor ligands, TLR3 ligands, TLR4 ligands, TLR5 ligands, TLR7/8 ligands, and TLR9 ligands. In another aspect, the composition further comprises a modulator of immune response. In another aspect, the modulator of immune response is a modulator of the innate immune response. In another aspect, the modulator is Interleukin-6 (IL-6), Interferon-gamma (IFN-γ), Transforming growth factor beta (TGF-β), or Interleukin-10 (IL-10), or an agonist or antagonist thereof.

[0009] As embodied and broadly described herein, an aspect of the present disclosure relates to a composition comprising monomers or multimers of: peptides or proteins comprising, consisting of, or consisting essentially of: one or more amino acid sequences selected from those sequences set forth in Tables 1 to 10 (SEQ ID NOS: 1 to 3522), concatemers, subsequences, portions, homologues, variants or derivatives thereof; a fusion protein comprising one or more amino acid sequences selected from those sequences set forth in Tables 1 to 10 (SEQ ID NOS: 1 to 3522); or a polynucleotide that encodes one or more peptides or proteins, comprising, consisting of, or consisting essentially of an amino acid sequence selected from those sequences set forth in Tables 1 to 10 (SEQ ID NOS: 1 to 3522), or a subsequence, portion, homologue, variant or derivative thereof.

[0010] As embodied and broadly described herein, an aspect of the present disclosure relates to a composition comprising one or more peptide-major histocompatibility complex (MHC) monomers or multimers, wherein the peptide-MHC monomer or multimer comprises a peptide comprising, consisting of, or consisting essentially of an amino acid sequence selected from those sequences set forth in Tables 1 to 10 (SEQ ID NOS: 1 to 3522), in a groove of the MHC monomer or multimer.

[0011] As embodied and broadly described herein, an aspect of the present disclosure relates to a composition comprising: one or more peptides or proteins comprising, consisting of, or consisting essentially of an amino acid sequence selected from those sequences set forth in Tables 1 to 10 (SEQ ID NOS: 1 to 3522), or a subsequence, portion, homologue, variant or derivative thereof, a fusion protein comprising one or more amino acid sequences selected from those sequences set forth in Tables 1 to 10 (SEQ ID NOS: 1 to 3522); a pool of 2 or more peptides selected from those sequences set forth in Tables 1 to 10 (SEQ ID NOS: 1 to 3522); or a polynucleotide that encodes one or more peptides or proteins, comprising, consisting of, or consisting essentially of an amino acid sequence selected from those sequences set forth in Tables 1 to 10 (SEQ ID NOS: 1 to 3522), or a subsequence, portion, homologue, variant or derivative thereof. In one aspect, the one or more peptides or proteins comprises, or wherein the fusion protein comprises, 2 or more amino acid sequences selected from those sequences set forth in Tables 1 to 10 (SEQ ID NOS: 1 to 3522), or a subsequence, portion, homologue, variant or derivative thereof. In another aspect, the protein or peptide comprises a SARS-CoV-2 T cell epitope. In another aspect, the one or more peptides or proteins comprises a SARS-CoV-2 CD8+ or CD4+ T cell epitope. In another aspect, the SARS-CoV-2 T cell epitope is not conserved in another coronavirus. In another aspect, the SARS-CoV-2 T cell epitope is conserved in another coronavirus. In another aspect, the one or more peptides or proteins has a length from about 9-15, 15-20, 20-25, 25-30, 30-40, 40-50, 50-75 or 75-100 amino acids. In another aspect, the one or more peptides or proteins elicits, stimulates, induces, promotes, increases or enhances a T cell response to SARS-CoV-2. In another aspect, the one or more peptides or proteins that elicits, stimulates, induces, promotes, increases or enhances the T cell response to SARS-CoV-2 is a SARS-CoV-2 spike, nucleoprotein, membrane, replicase polyprotein lab, protein 3a, envelope small membrane protein, non-structural protein 3b, protein 7a, protein 9b, non-structural protein 6, or non-structural protein 8a protein or peptide, or a variant, homologue, derivative or subsequence thereof. In another aspect, the composition further comprises formulating the one or more peptides or proteins into an immunogenic formulation with an adjuvant. In another aspect, the adjuvant is selected from the group consisting of adjuvant is selected from the group consisting of alum, aluminum hydroxide, aluminum phosphate, calcium phosphate hydroxide, cytosine-guanosine oligonucleotide (CpG-ODN) sequence, granulocyte macrophage colony stimulating factor (GM-CSF), monophosphoryl lipid A (MPL), poly(I:C), MF59, Quil A, N-acetyl muramyl-L-alanyl-D-isoglutamine (MDP), FIA, montanide, poly (DL-lactide-coglycolide), squalene, virosome, AS03, AS04, IL-1, IL-2, IL-3, IL-4, IL-5, IL-6, IL-7, IL-8, IL-10, IL-12, IL-15, IL-17, IL-18, STING, CD40L, pathogen-associated molecular patterns (PAMPs), damage-associated molecular pattern molecules (DAMPs), Freund's complete adjuvant, Freund's incomplete adjuvant, transforming growth factor (TGF)-beta antibody or antagonists, A2aR antagonists, lipopolysaccharides (LPS), Fas ligand, Trail, lymphotactin, Mannan (M-FP), APG-2, Hsp70 and Hsp90, pattern recognition receptor ligands, TLR3 ligands, TLR4 ligands, TLR5 ligands, TLR7/8 ligands, and TLR9 ligands. In another aspect, the composition further comprises a modulator of immune response. In another aspect, the modulator of immune response is a modulator of the innate immune response. In another aspect, the modulator is Interleukin-6 (IL-6), Interferon-gamma (IFN-g), Transforming growth factor beta (TGF-B), or Interleukin-10 (IL-10), or an agonist or antagonist thereof. In another aspect, the one or more peptides or proteins include the amino acid sequences selected from Tables 1 to 10 (SEQ ID NOS: 1 to 3522).

[0012] As embodied and broadly described herein, an aspect of the present disclosure relates to a composition comprising monomers or multimers of: one or more peptides or proteins comprising, consisting of, or consisting essentially of: one or more SARS-CoV-2 amino acid sequences selected from those sequences set forth in Tables 1 to 10 (SEQ ID NOS: 1 to 3522), concatemers, subsequences, portions, homologues, variants or derivatives thereof, a fusion protein comprising one or more amino acid sequences selected from those sequences set forth in Tables 1 to 10 (SEQ ID NOS: 1 to 3522); or a polynucleotide that encodes one or more peptides or proteins, comprising, consisting of, or consisting essentially of an amino acid sequence selected from those sequences set forth in Tables 1 to 10 (SEQ ID NOS: 1 to 3522), or a subsequence, portion, homologue, variant or derivative thereof.

[0013] As embodied and broadly described herein, an aspect of the present disclosure relates to a composition comprising one or more peptide-major histocompatibility complex (MHC) monomers or multimers, wherein the peptide-MHC monomer or multimer comprises a peptide comprising, consisting of, or consisting essentially of an amino acid sequence selected from those sequences set forth in Tables 1 to 10 (SEQ ID NOS: 1 to 3522), in a groove of the (MHC) monomer or multimer. In one aspect, the compositions include those amino acid sequences selected from Tables 1, 2, 3, 4, 5, 6, 7, 8, 9, or 10 (SEQ ID NOS: 1 to 3522).

[0014] As embodied and broadly described herein, an aspect of the present disclosure relates to a method for detecting the presence of: (i) a coronavirus or (ii) an immune response relevant to coronavirus infections, vaccines or therapies, including T cells responsive to one or more coronavirus peptides, comprising: providing one or more proteins or peptides for detection of an amount or a relative amount of, and/or the activity of, and/or the state of antigen-specific T-cells; contacting a biological sample suspected of having coronavirus-specific T-cells to one or more proteins or peptides for detection; and detecting an amount or a relative amount of, and/or the activity of, and/or the state of antigen-specific T-cells in the biological sample, wherein the one or more proteins or peptides for detection comprise one or more amino acid sequences set forth in Tables 1 to 10 (SEQ ID NOS: 1 to 3522), or comprise a pool of 2 or more amino acid sequences set forth in Tables 1 to 10 (SEQ ID NOS: 1 to 3522). In one aspect, detecting the amount or a relative amount of, and/or activity of antigen-specific T-cells comprises one or more steps of identification or detection of the antigen-specific T-cells and measuring the amount of the antigen-specific T-cells. In another aspect, the one or more peptides or proteins comprises 2 or more amino acid sequences selected from Tables 1 to 10 (SEQ ID NOS: 1 to 3522). In another aspect, detecting the amount or a relative amount of, and/or activity of antigen-specific T-cells comprises indirect detection and/or direct detection. In another aspect, the method of detecting an immune response relevant to the coronavirus comprises the following steps: providing an MHC monomer or an MHC multimer; contacting a population T-cells to the MHC monomer or MHC multimer; and measuring the number, activity or state of T-cells specific for the MHC monomer or MHC multimer. In another aspect, MHC monomer or MHC multimer comprises a protein or peptide of the coronavirus. In another aspect, protein or peptide comprises a CD8+ or CD4+ T cell epitope. In another aspect, T cell epitope is not conserved in another coronavirus. In another aspect, T cell epitope is conserved in another coronavirus. In another aspect, protein or peptide has a length from about 9-15, 15-20, 20-25, 25-30, 30-40, 40-50, 50-75 or 75-100 amino acids. In another aspect, proteins or peptides comprise 2 or more amino acid sequences selected from those sequences set forth in Tables 1, 2, 3, 4, 5, 6, 7, 8, 9, or 10 (SEQ ID NOS: 1 to 3522), or a subsequence, portion, homologue, variant or derivative thereof. In another aspect, the method further comprises detecting the presence or amount of the one or more peptides in a biological sample, or a response thereto, which is diagnostic of a coronavirus infection. In another aspect, detecting an amount or a relative amount of, and/or the activity of, and/or the state of antigen-specific T-cells in the biological sample comprises measuring one or more of a cytokine or lymphokine secretion assay, T cell proliferation, immunoprecipitation, immunoassay, ELISA, radioimmunoassay, immunofluorescence assay, Western Blot, FACS analysis, a competitive immunoassay, a noncompetitive immunoassay, a homogeneous immunoassay a heterogeneous immunoassay, a bioassay, a reporter assay, a luciferase assay, a microarray, a surface plasmon resonance detector, a florescence resonance energy transfer, immunocytochemistry, or a cell mediated assay, or a cytokine proliferation assay. In another aspect, the method further comprises administering a treatment comprising any of the compositions described hereinabove to the subject from which the biological sample was drawn that increases the amount or relative amount of, and/or activity of the antigen-specific T-cells.

[0015] As embodied and broadly described herein, an aspect of the present disclosure relates to a method for detecting the presence of: (i) SARS-CoV-2 or (ii) an immune response relevant to SARS-CoV-2 infections, vaccines or therapies, including T cells responsive to one or more SARS-CoV-2 peptides, comprising: providing one or more proteins or peptides for detection of an amount or a relative amount of, and/or the activity of, and/or the state of antigen-specific T-cells; contacting a biological sample suspected of having SARS-CoV-2-specific T-cells to one or more proteins or peptides for detection; and detecting an amount or a relative amount of, and/or the activity of, and/or the state of antigen-specific T-cells in the biological sample, wherein the one or more proteins or peptides for detection comprise one or more amino acid sequences set forth in those sequences set forth in Tables 1 to 10 (SEQ ID NOS: 1 to 3522), or comprise a pool of 2 or more amino acid sequences set forth in those sequences set forth in Tables 1 to 10 (SEQ ID NOS: 1 to 3522). In one aspect, detecting the amount or a relative amount of, and/or activity of antigen-specific T-cells comprises one or more steps of identification or detection of the antigen-specific T-cells and measuring the amount of the antigen-specific T-cells. In another aspect, the one or more peptides or proteins comprises 2 or more amino acid sequences selected from those sequences set forth in Tables 1, 2, 3, 4, 5, 6, 7, 8, 9 or 10 (SEQ ID NOS: 1 to 3522). In another aspect, the detecting the amount or a relative amount of, and/or activity of antigen-specific T-cells comprises indirect detection and/or direct detection. In another aspect, the method of detecting an immune response relevant to SARS-CoV-2 comprises the following steps: providing an MHC monomer or an MHC multimer; contacting a population T-cells to the MHC monomer or MHC multimer; and measuring the number, activity or state of T-cells specific for the MHC monomer or MHC multimer. In another aspect, the MHC monomer or MHC multimer comprises a protein or peptide of SARS-CoV-2. In another aspect, the protein or peptide comprises a SARS-CoV-2 CD8+ or CD4+ T cell epitope. In another aspect, the SARS-CoV-2 T cell epitope is not conserved in another coronavirus. In another aspect, the SARS-CoV-2 T cell epitope is conserved in another coronavirus. In another aspect, the protein or peptide has a length from about 9-15, 15-20, 20-25, 25-30, 30-40, 40-50, 50-75 or 75-100 amino acids. In another aspect, the proteins or peptides comprise 2 or more amino acid sequences selected from those sequences set forth in Tables 1, 2, 3, 4, 5, 6, 7, 8, 9, or 10 (SEQ ID NOS: 1 to 3522), or a subsequence, portion, homologue, variant or derivative thereof. In another aspect, the method further comprises detecting the presence or amount of the one or more peptides in a biological sample, or a response thereto, which is diagnostic of a SARS-CoV-2 infection. In another aspect, the detecting an amount or a relative amount of, and/or the activity of, and/or the state of antigen-specific T-cells in the biological sample comprises measuring one or more of a cytokine or lymphokine secretion assay, T cell proliferation, immunoprecipitation, immunoassay, ELISA, radioimmunoassay, immunofluorescence assay, Western Blot, FACS analysis, a competitive immunoassay, a noncompetitive immunoassay, a homogeneous immunoassay a heterogeneous immunoassay, a bioassay, a reporter assay, a luciferase assay, a microarray, a surface plasmon resonance detector, a florescence resonance energy transfer, immunocytochemistry, or a cell mediated assay, or a cytokine proliferation assay. In another aspect, the method further comprises administering a treatment comprising the composition describe hereinabove to the subject from which the biological sample was drawn that increases the amount or relative amount of, and/or activity of the antigen-specific T-cells.

[0016] As embodied and broadly described herein, an aspect of the present disclosure relates to a method detecting a coronavirus infection or exposure in a subject, the method comprising, consisting of, or consisting essentially of: contacting a biological sample from a subject with a composition described hereinabove; and determining if the composition elicits an immune response from the contacted cells, wherein the presence of an immune response indicates that the subject has been exposed to or infected with coronavirus. In one aspect, the sample comprises T cells. In another aspect, the response comprises inducing, increasing, promoting or stimulating anti-coronavirus activity of T cells. In another aspect, the T cells are CD8+ or CD4+ T cells. In another aspect, the method comprises determining whether the subject has been infected by or exposed to the coronavirus more than once by determining if the subject elicits a secondary T cell immune response profile that is different from a primary T cell immune response profile. In another aspect, the method further comprises diagnosing a coronavirus infection or exposure in a subject, the method comprising contacting a biological sample from a subject with a composition described hereinabove, and determining if the composition elicits a T cell immune response, wherein the T cell immune response identifies that the subject has been infected with or exposed to a coronavirus. In another aspect, the method is conducted three or more days following the date of suspected infection by or exposure to a coronavirus.

[0017] As embodied and broadly described herein, an aspect of the present disclosure relates to a method detecting SARS-CoV-2 infection or exposure in a subject, the method comprising, consisting of, or consisting essentially of: contacting a biological sample from a subject with a composition describe hereinabove; and determining if the composition elicits an immune response from the contacted cells, wherein the presence of an immune response indicates that the subject has been exposed to or infected with SARS-CoV-2. In one aspect, the sample comprises T cells. In another aspect, the response comprises inducing, increasing, promoting or stimulating anti-SARS-CoV-2 activity of T cells. In another aspect, the T cells are CD8+ or CD4+ T cells. In another aspect, the method comprises determining whether the subject has been infected by or exposed to SARS-CoV-2 more than once by determining if the subject elicits a secondary T cell immune response profile that is different from a primary T cell immune response profile. In another aspect, the method further comprises diagnosing a SARS-CoV-2 infection or exposure in a subject, the method comprising contacting a biological sample from a subject with a composition described hereinabove; and determining if the composition elicits a T cell immune response, wherein the T cell immune response identifies that the subject has been infected with or exposed to SARS-CoV-2. In another aspect, the method is conducted three or more days following the date of suspected infection by or exposure to a coronavirus.

[0018] 29. A kit for the detection of coronavirus or an immune response to coronavirus in a subject comprising, consisting of or consisting essentially of: one or more T cells that specifically detect the presence of: one or more amino acid sequences selected from those sequences set forth in Tables 1 to 10 (SEQ ID NOS: 1 to 3522), or a subsequence, portion, homologue, variant or derivative thereof, or a fusion protein comprising one or more amino acid sequences selected from those sequences set forth in Tables 1 to 10 (SEQ ID NOS: 1 to 3522); or a pool of 2 or more peptides selected from the amino acid sequences set forth in Tables 1 to 10 (SEQ ID NOS: 1 to 3522). In one aspect, the one or more amino acid sequences are selected from a coronavirus T cell epitope set forth in Tables 1 to 10 (SEQ ID NOS: 1 to 3522). In another aspect, the composition comprises: one or more amino acid sequences selected from those sequences set forth in Tables 1 to 10 (SEQ ID NOS: 1 to 3522), or a subsequence, portion, homologue, variant or derivative thereof, fusion protein comprising one or more amino acid sequences selected from those sequences set forth in Tables 1 to 10 (SEQ ID NOS: 1 to 3522); or a pool of 2 or more peptides selected from the amino acid sequences set forth in those sequences set forth in Tables 1 to 10 (SEQ ID NOS: 1 to 3522). In another aspect, the amino acid sequence comprises a coronavirus CD8+ or CD4+ T cell epitope. In another aspect, the T cell epitope is not conserved in another coronavirus. In another aspect, the T cell epitope is conserved in another coronavirus. In another aspect, the fusion protein has a length from about 9-15, 15-20, 20-25, 25-30, 30-40, 40-50, 50-75 or 75-100 amino acids. In another aspect, the part thereof for the detection of: (i) coronavirus or (ii) an immune response relevant to coronavirus infections, vaccines or therapies, including T cells responsive to coronavirus. In another aspect, the kit includes reagents for detecting an amount or a relative amount of, and/or the activity of, and/or the state of antigen-specific T-cells in the biological sample comprises measuring one or more of a cytokine or lymphokine secretion assay, T cell proliferation, immunoprecipitation, immunoassay, ELISA, radioimmunoassay, immunofluorescence assay, Western Blot, FACS analysis, a competitive immunoassay, a noncompetitive immunoassay, a homogeneous immunoassay a heterogeneous immunoassay, a bioassay, a reporter assay, a luciferase assay, a microarray, a surface plasmon resonance detector, a florescence resonance energy transfer, immunocytochemistry, or a cell mediated assay, or a cytokine proliferation assay. In another aspect, the kit includes reagents for determining a Human Leukocyte Antigen (HLA) profile of a subject, and selecting peptides that are presented by the HLA profile of the subject for detecting an immune response to coronavirus.

[0019] As embodied and broadly described herein, an aspect of the present disclosure relates to a kit for the detection of SARS-CoV-2 or an immune response to SARS-CoV-2 in a subject comprising, consisting of or consisting essentially of: one or more T cells that specifically detect the presence of: one or more amino acid sequences selected from those sequences set forth in Tables 1 to 10 (SEQ ID NOS: 1 to 3522), or a subsequence, portion, homologue, variant or derivative thereof, a fusion protein comprising one or more amino acid sequences selected from those sequences set forth in Tables 1 to 10 (SEQ ID NOS: 1 to 3522); or a pool of 2 or more peptides selected from the amino acid sequences set forth in those sequences set forth in Tables 1 to 10 (SEQ ID NOS: 1 to 3522). In one aspect, the one or more amino acid sequences is selected from a SARS-CoV-2 CD4 T cell epitope selected from Tables 1 to 10 (SEQ ID NOS: 1 to 3522). In another aspect, the one or more amino acid sequences include amino acid sequences selected from Tables 1 to 10 (SEQ ID NOS: 1 to 3522). In another aspect, the amino acid sequence comprises a SARS-CoV-2 CD8+ or CD4+ T cell epitope. In another aspect, the SARS-CoV-2 T cell epitope is not conserved in another coronavirus. In another aspect, the SARS-CoV-2 T cell epitope is conserved in another coronavirus. In another aspect, the fusion protein has a length from about 9-15, 15-20, 20-25, 25-30, 30-40, 40-50, 50-75 or 75-100 amino acids. In another aspect, the kit includes instruction for a diagnostic method, a process, a composition, a product, a service or component part thereof for the detection of: (i) SARS-CoV-2 or (ii) an immune response relevant to SARS-CoV-2 infections, vaccines or therapies, including T cells responsive to SARS-CoV-2. In another aspect, the kit includes reagents for detecting an amount or a relative amount of, and/or the activity of, and/or the state of antigen-specific T-cells in the biological sample comprises measuring one or more of a cytokine or lymphokine secretion assay, T cell proliferation, immunoprecipitation, immunoassay, ELISA, radioimmunoassay, immunofluorescence assay, Western Blot, FACS analysis, a competitive immunoassay, a noncompetitive immunoassay, a homogeneous immunoassay a heterogeneous immunoassay, a bioassay, a reporter assay, a luciferase assay, a microarray, a surface plasmon resonance detector, a florescence resonance energy transfer, immunocytochemistry, or a cell mediated assay, or a cytokine proliferation assay. In another aspect, the kit includes reagents for determining a Human Leukocyte Antigen (HLA) profile of a subject, and selecting peptides that are presented by the HLA profile of the subject for detecting an immune response to SARS-CoV-2.

[0020] As embodied and broadly described herein, an aspect of the present disclosure relates to a method of stimulating, inducing, promoting, increasing, or enhancing an immune response against a coronavirus in a subject, comprising: administering a composition describe hereinabove, in an amount sufficient to stimulate, induce, promote, increase, or enhance an immune response against the coronavirus in the subject. In one aspect, the immune response provides the subject with protection against a coronavirus infection or pathology, or one or more physiological conditions, disorders, illnesses, diseases or symptoms caused by or associated with coronavirus infection or pathology. In another aspect, the acid sequences set forth in Tables 1 to 10 (SEQ ID NOS: 1 to 3522), or a subsequence, portion, homologue, variant or derivative thereof.

[0021] As embodied and broadly described herein, an aspect of the present disclosure relates to a method of stimulating, inducing, promoting, increasing, or enhancing an immune response against SARS-CoV-2 in a subject, comprising: administering a composition described hereinabove, in an amount sufficient to stimulate, induce, promote, increase, or enhance an immune response against SARS-CoV-2 in the subject. In one aspect, the immune response provides the subject with protection against a SARS-CoV-2 infection or pathology, or one or more physiological conditions, disorders, illnesses, diseases or symptoms caused by or associated with SARS-CoV-2 infection or pathology. In another aspect, the immune response is specific to: one or more SARS-CoV-2 peptides selected from the amino acid sequences set forth in those sequences set forth in Tables 1 to 10 (SEQ ID NOS: 1 to 3522), or a subsequence, portion, homologue, variant or derivative thereof. In another aspect, the one or more SARS-CoV-2 peptides selected from the amino acid sequences set forth in those sequences set forth in Tables 1, 2, 3, 4, 5, 6, 7, 8, 9, or 10 (SEQ ID NOS: 1 to 3522), or a subsequence, portion, homologue, variant or derivative thereof, include the amino acid sequences selected from Tables 1, 2, 3, 4, 5, 6, 7, 8, 9, or 10 (SEQ ID NOS: 1 to 3522).

[0022] As embodied and broadly described herein, an aspect of the present disclosure relates to a method of stimulating, inducing, promoting, increasing, or enhancing an immune response against SARS-CoV-2 in a subject, comprising: administering to a subject an amount of a protein or peptide or a polynucleotide that expresses the protein or peptide comprising, consisting of or consisting essentially of an amino acid sequence of the SARS-CoV-2 spike, nucleoprotein, membrane, replicase polyprotein lab, protein 3a, envelope small membrane protein, non-structural protein 3b, protein 7a, protein 9b, non-structural protein 6, or non-structural protein 8a protein or peptide, or a variant, homologue, derivative or subsequence thereof, wherein the protein or peptide comprises at least two peptides selected from the amino acid sequences set forth in Tables 1 to 10 (SEQ ID NOS: 1 to 3522), or both or a subsequence, portion, homologue, variant or derivative thereof, in an amount sufficient to prevent, stimulate, induce, promote, increase, immunize against, or enhance an immune response against SARS-CoV-2 in the subject. In one aspect, the immune response provides the subject with protection against SARS-CoV-2 infection or pathology, or one or more physiological conditions, disorders, illnesses, diseases or symptoms caused by or associated with SARS-CoV-2 infection or pathology.

[0023] As embodied and broadly described herein, an aspect of the present disclosure relates to a method of treating, preventing, or immunizing a subject against SARS-CoV-2 infection, comprising administering to a subject an amount of a protein, peptide or a polynucleotide that expresses the protein or peptide comprising, consisting of, or consisting essentially of an amino acid sequence of a coronavirus spike, nucleoprotein, membrane, replicase polyprotein lab, protein 3a, envelope small membrane protein, non-structural protein 3b, protein 7a, protein 9b, non-structural protein 6, or non-structural protein 8a protein or peptide, or a variant, homologue, derivative or subsequence thereof, wherein the protein or peptide comprises at least two amino acid sequences selected from Tables 1 to 10 (SEQ ID NOS: 1 to 3522), or both, or a subsequence, portion, homologue, variant or derivative thereof, in an amount sufficient to treat, prevent, or immunize the subject for SARS-CoV-2 infection, wherein the protein or peptide comprises or consists of a coronavirus T cell epitope that elicits, stimulates, induces, promotes, increases, or enhances an anti-SARS-CoV-2 T cell immune response. In one aspect, the one or more amino acid sequences are selected from those sequences set forth in Tables 1 to 10 (SEQ ID NOS: 1 to 3522), or a subsequence, portion, homologue, variant or derivative thereof; a fusion protein comprising one or more amino acid sequences selected from those sequences set forth in Tables 1 to 10 (SEQ ID NOS: 1 to 3522); or a pool of 2 or more peptides selected from the amino acid sequences set forth in those sequences set forth in Tables 1 to 10 (SEQ ID NOS: 1 to 3522). In one aspect, the anti-SARS-CoV-2 T cell response is a CD8+, a CD4+ T cell response, or both. In another aspect, the T cell epitope is conserved across two or more clinical isolates of SARS-CoV-2, two or more circulating forms of SARS-CoV-2, or two or more coronaviruses. In another aspect, the SARS-CoV-2 infection is an acute infection. In another aspect, the subject is a mammal or a human. In another aspect, the method reduces SARS-CoV-2 viral titer, increases or stimulates SARS-CoV-2 viral clearance, reduces or inhibits SARS-CoV-2 viral proliferation, reduces or inhibits increases in SARS-CoV-2 viral titer or SARS-CoV-2 viral proliferation, reduces the amount of a SARS-CoV-2 viral protein or the amount of a SARS-CoV-2 viral nucleic acid, or reduces or inhibits synthesis of a SARS-CoV-2 viral protein or a SARS-CoV-2 viral nucleic acid. In another aspect, the method reduces one or more adverse physiological conditions, disorders, illness, diseases, symptoms or complications caused by or associated with SARS-CoV-2 infection or pathology. In another aspect, the method improves one or more adverse physiological conditions, disorders, illness, diseases, symptoms or complications caused by or associated with SARS-CoV-2 infection or pathology. In another aspect, the symptom is fever or chills, cough, shortness of breath or difficulty breathing, fatigue, muscle or body aches, headache, new loss of taste or smell, sore throat, congestion or runny nose, nausea or vomiting, or diarrhea. In another aspect, the method reduces or inhibits susceptibility to SARS-CoV-2 infection or pathology. In another aspect, the protein or peptide, or a subsequence, portion, homologue, variant or derivative thereof, is administered prior to, substantially contemporaneously with or following exposure to or infection of the subject with SARS-CoV-2. In another aspect, a plurality of SARS-CoV-2 T cell epitopes are administered prior to, substantially contemporaneously with or following exposure to or infection of the subject with SARS-CoV-2. In another aspect, the protein or peptide, or a subsequence, portion, homologue, variant or derivative thereof is administered within 2-72 hours, 2-48 hours, 4-24 hours, 4-18 hours, or 6-12 hours after a symptom of SARS-CoV-2 infection or exposure develops. In another aspect, the protein or peptide, or a subsequence, portion, homologue, variant or derivative thereof is administered prior to exposure to or infection of the subject with SARS-CoV-2. In another aspect, the method further comprises administering a modulator of immune response prior to, substantially contemporaneously with or following the administration to the subject of an amount of a protein or peptide. In another aspect, the modulator of immune response is a modulator of the innate immune response. In another aspect, the modulator is IL-6, IFN-γ, TGF-β, or IL-10, or an agonist or antagonist thereof. In another aspect, the one or amino acid sequences include amino acid sequences selected from Tables 1 to 10 (SEQ ID NOS: 1 to 3522).

[0024] As embodied and broadly described herein, an aspect of the present disclosure relates to a method of treating, preventing, or immunizing a subject against SARS-CoV-2 infection, comprising administering to a subject the composition described hereinabove in an amount sufficient to treat, prevent, or immunize the subject for SARS-CoV-2 infection. In one aspect, the SARS-CoV-2 infection is an acute infection. In another aspect, the method reduces SARS-CoV-2 viral titer, increases or stimulates SARS-CoV-2 viral clearance, reduces or inhibits SARS-CoV-2 viral proliferation, reduces or inhibits increases in SARS-CoV-2 viral titer or SARS-CoV-2 viral proliferation, reduces the amount of a SARS-CoV-2 viral protein or the amount of a SARS-CoV-2 viral nucleic acid, or reduces or inhibits synthesis of a SARS-CoV-2 viral protein or a SARS-CoV-2 viral nucleic acid. In another aspect, the method reduces one or more adverse physiological conditions, disorders, illness, diseases, symptoms or complications caused by or associated with SARS-CoV-2 infection or pathology. In another aspect, the method improves one or more adverse physiological conditions, disorders, illness, diseases, symptoms or complications caused by or associated with SARS-CoV-2 infection or pathology. In another aspect, the symptom is fever or chills, cough, shortness of breath or difficulty breathing, fatigue, muscle or body aches, headache, new loss of taste or smell, sore throat, congestion or runny nose, nausea, vomiting, or diarrhea. In another aspect, the method reduces or inhibits susceptibility to SARS-CoV-2 infection or pathology. In another aspect, the composition is administered prior to, substantially contemporaneously with or following exposure to or infection of the subject with SARS-CoV-2. In another aspect, the composition is administered prior to, substantially contemporaneously with or following exposure to or infection of the subject with SARS-CoV-2. In another aspect, the composition is administered within 2-72 hours, 2-48 hours, 4-24 hours, 4-18 hours, or 6-12 hours after a symptom of SARS-CoV-2 infection or exposure develops. In another aspect, the composition is administered prior to exposure to or infection of the subject with SARS-CoV-2.

[0025] As embodied and broadly described herein, an aspect of the present disclosure relates to a peptide or peptides that are immunoprevalent or immunodominant in a virus obtained by a method consisting of, or consisting essentially of: obtaining an amino acid sequence of the virus; determining one or more sets of overlapping peptides spanning one or more virus antigen using unbiased selection; synthesizing one or more pools of virus peptides comprising the one or more sets of overlapping peptides; combining the one or more pools of virus peptides with Class I major histocompatibility proteins (MHC), Class II MHC, or both Class I and Class II MHC to form peptide-MHC complexes; contacting the peptide-MHC complexes with T cells from subjects exposed to the virus; determining which pools triggered cytokine release by the T cells; and deconvoluting from the pool of peptides that elicited cytokine release by the T cells, which peptide or peptides are immunoprevalent or immunodominant in the pool. In one aspect, the virus is a coronavirus. In another aspect, the coronavirus is SARS-CoV-2. In another aspect, the immunodominant peptides are selected from 1, 2 or more peptides selected from the amino acid sequences set forth in Tables 1 to 10 (SEQ ID NOS: 1 to 3522). In another aspect, the immunodominant peptides are selected from 1, 2 or more peptides selected from the amino acid sequences set forth in those sequences set forth in Tables 1 to 10 (SEQ ID NOS: 1 to 3522). In another aspect, the peptide or peptides include amino acid sequences set forth in Tables 1 to 10 (SEQ ID NOS: 1 to 3522).

[0026] As embodied and broadly described herein, an aspect of the present disclosure relates to a method of selecting an immunoprevalent or immunodominant peptide or protein of a virus comprising, consisting of, or consisting essentially of: obtaining an amino acid sequence of the virus; determining one or more sets of overlapping peptides spanning one or more virus antigen using unbiased selection; synthesizing one or more pools of virus peptides comprising the one or more sets of overlapping peptides; combining the one or more pools of virus peptides with Class I major histocompatibility proteins (MHC), Class II MHC, or both Class I and Class II MHC to form peptide-MHC complexes; contacting the peptide-MHC complexes with T cells from subjects exposed to the virus; determining which pools triggered cytokine release by the T cells; and deconvoluting from the pool of peptides that elicited cytokine release by the T cells, which peptide or peptides are immunoprevalent or immunodominant in the pool. In one aspect, the virus is a coronavirus. In another aspect, the coronavirus is SARS-CoV-2. In another aspect, the immunodominant peptides are selected from 1, 2 or more peptides selected from the amino acid sequences set forth in Tables 1 to 10 (SEQ ID NOS: 1 to 3522). In another aspect, the immunodominant peptides are selected from 1, 2 or more peptides selected from the amino acid sequences set forth in those sequences set forth in Tables 1 to 10 (SEQ ID NOS: 1 to 3522). In another aspect, the peptide or peptides include amino acid sequences set forth in Tables 1 to 10 (SEQ ID NOS: 1 to 3522).

[0027] As embodied and broadly described herein, an aspect of the present disclosure relates to a polynucleotide that expresses one or more peptides or proteins, comprising, consisting of, or consisting essentially of an amino acid sequence selected from those sequences set forth in Tables 1 to 10 (SEQ ID NOS: 1 to 3522), or a subsequence, portion, homologue, variant or derivative thereof, a fusion protein comprising one or more amino acid sequences selected from those sequences set forth in Tables 1 to 10 (SEQ ID NOS: 1 to 3522); or a pool of 2 or more peptides comprising, consisting of, or consisting essentially of amino acid sequences selected from those sequences set forth in Tables 1 to 10 (SEQ ID NOS: 1 to 3522).

[0028] As embodied and broadly described herein, an aspect of the present disclosure relates to a vector that comprises the polynucleotide hereinabove. In one aspect, the vector is a viral vector.

[0029] As embodied and broadly described herein, an aspect of the present disclosure relates to a host cell that comprises the vector hereinabove.

[0030] As embodied and broadly described herein, an aspect of the present disclosure relates to a polynucleotide that expresses: one or more peptides or proteins comprising, consisting of, or consisting essentially of an amino acid sequence selected from those sequences set forth in Tables 1 to 10 (SEQ ID NOS: 1 to 3522), or a subsequence, portion, homologue, variant or derivative thereof, a fusion protein comprising one or more amino acid sequences selected from those sequences set forth in Tables 1 to 10 (SEQ ID NOS: 1 to 3522); or a pool of 2 or more peptides selected from those sequences set forth in Tables 1 to 10 (SEQ ID NOS: 1 to 3522).

[0031] As embodied and broadly described herein, an aspect of the present disclosure relates to a vector that comprises the polynucleotide hereinabove. In one aspect, the vector is a viral vector.

[0032] As embodied and broadly described herein, an aspect of the present disclosure relates to a host cell that comprises the vector hereinabove.

[0033] As embodied and broadly described herein, an aspect of the present disclosure relates to a peptide-major histocompatibility complex (MHC)/peptide multimer comprising at least two MHC/peptide monomers, wherein at least one MHC/peptide monomer comprises a peptide derived from SARS-CoV-2.

[0034] As embodied and broadly described herein, an aspect of the present disclosure relates to a peptide-major histocompatibility complex (MHC)/peptide multimer comprising at least two MHC/peptide monomers, wherein at least one MHC/peptide monomer comprises a peptide that comprises, consists of, or consists essentially of an amino acid sequence selected from the sequences set forth in Tables 1 to 10 (SEQ ID NOS: 1 to 3522). In one aspect, at least one MHC/peptide monomer comprises a peptide derived from SARS-CoV-2 Spike (S) protein such as a SARS-CoV-2 Spike (S) protein derived peptide set forth in Tables 1 to 10 (SEQ ID NOS: 1 to 3522). In one aspect, at least one MHC/peptide monomer comprises a peptide derived from SARS-CoV-2 Membrane (M) protein such as a SARS-CoV-2 Membrane (M) protein derived peptide set forth in Tables 1 to 10 (SEQ ID NOS: 1 to 3522). In one aspect, at least one MHC/peptide monomer comprises a peptide derived from SARS-CoV-2 Nucleocapsid (N) protein such as a SARS-CoV-2 Nucleocapsid (N) protein derived peptide set forth in Tables 1 to 10 (SEQ ID NOS: 1 to 3522). In one aspect, at least one MHC/peptide monomer comprises a peptide derived from SARS-CoV-2 Envelope (E) protein such as a SARS-CoV-2 Envelope (E) protein derived peptide set forth in Tables 1 to 10 (SEQ ID NOS: 1 to 3522). In one aspect, at least one MHC/peptide monomer comprises a peptide derived from SARS-CoV-2 ORF3a protein such as a SARS-CoV-2 ORF3a protein derived peptide set forth in Tables 1 to 10 (SEQ ID NOS: 1 to 3522). In one aspect, at least one MHC/peptide monomer comprises a peptide derived from SARS-CoV-2 ORF6 protein such as a SARS-CoV-2 ORF6 protein derived peptide set forth in Tables 1 to 10 (SEQ ID NOS: 1 to 3522). In one aspect, at least one MHC/peptide monomer comprises a peptide derived from SARS-CoV-2 ORF7a protein such as a SARS-CoV-2 ORF7a protein derived peptide set forth in Tables 1 to 10 (SEQ ID NOS: 1 to 3522). In one aspect, at least one MHC/peptide monomer comprises a peptide derived from SARS-CoV-2 ORF7b protein such as a SARS-CoV-2 ORF7b protein derived peptide set forth in Tables 1 to 10 (SEQ ID NOS: 1 to 3522). In one aspect, at least one MHC/peptide monomer comprises a peptide derived from SARS-CoV-2 ORF8 protein such as a SARS-CoV-2 ORF8 protein derived peptide set forth in Tables 1 to 10 (SEQ ID NOS: 1 to 3522). In one aspect, at least one MHC/peptide monomer comprises a peptide derived from SARS-CoV-2 ORF10 protein such as a SARS-CoV-2 ORF10 protein derived peptide set forth in Tables 1 to 10 (SEQ ID NOS: 1 to 3522). In one aspect, at least one MHC/peptide monomer comprises a peptide derived from SARS-CoV-2 nsp1 protein such as a SARS-CoV-2 nsp1 protein derived peptide set forth in Tables 1 to 10 (SEQ ID NOS: 1 to 3522). In one aspect, at least one MHC/peptide monomer comprises a peptide derived from SARS-CoV-2 nsp2 protein such as a SARS-CoV-2 nsp2 protein derived peptide set forth in Tables 1 to 10 (SEQ ID NOS: 1 to 3522). In one aspect, at least one MHC/peptide monomer comprises a peptide derived from SARS-CoV-2 nsp3 protein such as a SARS-CoV-2 nsp3 protein derived peptide set forth in Tables 1 to 10 (SEQ ID NOS: 1 to 3522). In one aspect, at least one MHC/peptide monomer comprises a peptide derived from SARS-CoV-2 nsp4 protein such as a SARS-CoV-2 nsp4 protein derived peptide set forth in Tables 1 to 10 (SEQ ID NOS: 1 to 3522). In one aspect, at least one MHC/peptide monomer comprises a peptide derived from SARS-CoV-2 nsp5 protein such as a SARS-CoV-2 nsp5 protein derived peptide set forth in Tables 1 to 10 (SEQ ID NOS: 1 to 3522). In one aspect, at least one MHC/peptide monomer comprises a peptide derived from SARS-CoV-2 nsp6 protein such as a SARS-CoV-2 nsp6 protein derived peptide set forth in Tables 1 to 10 (SEQ ID NOS: 1 to 3522). In one aspect, at least one MHC/peptide monomer comprises a peptide derived from SARS-CoV-2 nsp7 protein such as a SARS-CoV-2 nsp7 protein derived peptide set forth in Tables 1 to 10 (SEQ ID NOS: 1 to 3522). In one aspect, at least one MHC/peptide monomer comprises a peptide derived from SARS-CoV-2 nsp8 protein such as a SARS-CoV-2 nsp8 protein derived peptide set forth in Tables 1 to 10 (SEQ ID NOS: 1 to 3522). In one aspect, at least one MHC/peptide monomer comprises a peptide derived from SARS-CoV-2 nsp9 protein such as a SARS-CoV-2 nsp9 protein derived peptide set forth in Tables 1 to 10 (SEQ ID NOS: 1 to 3522). In one aspect, at least one MHC/peptide monomer comprises a peptide derived from SARS-CoV-2 nsp10 protein such as a SARS-CoV-2 nsp10 protein derived peptide set forth in Tables 1 to 10 (SEQ ID NOS: 1 to 3522). In one aspect, at least one MHC/peptide monomer comprises a peptide derived from SARS-CoV-2 nsp12 protein such as a SARS-CoV-2 nsp12 protein derived peptide set forth in Tables 1 to 10 (SEQ ID NOS: 1 to 3522). In one aspect, at least one MHC/peptide monomer comprises a peptide derived from SARS-CoV-2 nsp13 protein such as a SARS-CoV-2 nsp13 protein derived peptide set forth in Tables 1 to 10 (SEQ ID NOS: 1 to 3522). In one aspect, at least one MHC/peptide monomer comprises a peptide derived from SARS-CoV-2 nsp14 protein such as a SARS-CoV-2 nsp14 protein derived peptide set forth in Tables 1 to 10 (SEQ ID NOS: 1 to 3522). In one aspect, at least one MHC/peptide monomer comprises a peptide derived from SARS-CoV-2 nsp15 protein such as a SARS-CoV-2 nsp15 protein derived peptide set forth in Tables 1 to 10 (SEQ ID NOS: 1 to 3522). In one aspect, at least one MHC/peptide monomer comprises a peptide derived from SARS-CoV-2 nsp16 protein such as a SARS-CoV-2 nsp16 protein derived peptide set forth in Tables 1 to 10 (SEQ ID NOS: 1 to 3522). In one aspect, at least one MHC/peptide monomer comprises a peptide comprising, consisting of, or consisting essentially of an amino acid sequence selected from the SARS-CoV-2 B.1.1.529 derived sequences set forth in Table 8 (SEQ ID NOS: 2571 to 2615). In one aspect, at least one MHC/peptide monomer comprises a peptide comprising, consisting of, or consisting essentially of an amino acid sequence selected from the SARS-CoV-2 derived sequences set forth in Table 1 (SEQ ID NOS: 1 to 1468). In one aspect, at least one MHC/peptide monomer comprises a peptide comprising, consisting of, or consisting essentially of an amino acid sequence selected from the SARS-CoV-2 derived sequences set forth in Table 2 (SEQ ID NOS: 1469 to 1521) (CD8S(D) megapool). In one aspect, at least one MHC/peptide monomer comprises a peptide comprising, consisting of, or consisting essentially of an amino acid sequence selected from the SARS-CoV-2 derived sequences set forth in Table 3 (SEQ ID NOS: 1522 to 1665) (CD8S (ND) megapool). In one aspect, at least one MHC/peptide monomer comprises a peptide comprising, consisting of, or consisting essentially of an amino acid sequence selected from the SARS-CoV-2 derived sequences set forth in Table 4 (SEQ ID NOS: 1666 to 1818) (CD8R(D) megapool). In one aspect, at least one MHC/peptide monomer comprises a peptide comprising, consisting of, or consisting essentially of an amino acid sequence selected from the SARS-CoV-2 derived sequences set forth in Table 5 (SEQ ID NOS: 1819 to 2286) (CD8R(ND) megapool). In one aspect, at least one MHC/peptide monomer comprises a peptide comprising, consisting of, or consisting essentially of an amino acid sequence selected from the SARS-CoV-2 derived sequences set forth in Table 6 (SEQ ID NOS: 2287 to 2355) (CD4R(D) megapool). In one aspect, at least one MHC/peptide monomer comprises a peptide comprising, consisting of, or consisting essentially of an amino acid sequence selected from the SARS-CoV-2 derived sequences set forth in Table 7 (SEQ ID NOS: 2356 to 2570) (CD4R(ND) megapool). In one aspect, at least one MHC/peptide monomer comprises a peptide comprising, consisting of, or consisting essentially of an amino acid sequence selected from the SARS-CoV-2 derived sequences set forth in Table 9 (SEQ ID NOS: 2616 to 2900) (CD4RE megapool). In one aspect, at least one MHC/peptide monomer comprises a peptide comprising, consisting of, or consisting essentially of an amino acid sequence selected from the SARS-CoV-2 derived sequences set forth in Table 10 (SEQ ID NOS: 2901 to 3522) (CD8RE megapool). In one aspect, the at least two MHC/peptide monomers are identical. In one aspect, the MHC/peptide multimer comprise at least 3, such as at least 4, 5, 6, 7, 8, 9, 10, 11, 12, 13, 14, 15, 16, 17, 18, 19 or 20 MHC/peptide monomers. In one aspect, the MHC/peptide multimer comprise at least 3, such as at least 4, 5, 6, 7, 8, 9, 10, 11, 12, 13, 14, 15, 16, 17, 18, 19 or 20 identical MHC/peptide monomers. In one aspect, the MHC/peptide multimer comprise at least 3, such as at least 4, 5, 6, 7, 8, 9, 10, 11, 12, 13, 14, 15, 16, 17, 18, 19 or 20 different MHC/peptide monomers. In one aspect, at least 3, such as at least 4, 5, 6, 7, 8, 9, 10, 11, 12, 13, 14, 15, 16, 17, 18, 19 or 20 of the MHC/peptide monomers comprises a peptide which comprises, consists of, or consists essentially of an amino acid sequence selected from the sequences set forth in Tables 1 to 10 (SEQ ID NOS: 1 to 3522). In one aspect, at least 3, such as at least 4, 5, 6, 7, 8, 9, 10, 11, 12, 13, 14, 15, 16, 17, 18, 19 or 20 of the MHC/peptide monomers comprises a peptide which comprises, consists of, or consists essentially of an amino acid sequence selected from the SARS-CoV-2 B.1.1.529 derived sequences set forth in Table 8 (SEQ ID NOS: 2571 to 2615). In one aspect, at least 3, such as at least 4, 5, 6, 7, 8, 9, 10, 11, 12, 13, 14, 15, 16, 17, 18, 19 or 20 of the MHC/peptide monomers comprises a peptide which comprises, consists of, or consists essentially of an amino acid sequence selected from the SARS-CoV-2 Spike (S) protein, Membrane (M) protein, Nucleocapsid (N) protein, Envelope (E) protein, ORF3a, ORF7a, ORF8, nsp1, nsp2, nsp3, nsp6, nsp9, nsp10, nsp12, nsp13, nsp14 and/or nsp15 derived sequences set forth in Tables 1 to 10 (SEQ ID NOS: 1 to 3522). In one aspect, each MHC/peptide monomer of the MHC/peptide multimer is associated with one or more multimerization domains such as a multimerization domain selected from the group consisting of proteins, peptides, albumins, immunoglobulins, coiled-coil helixes, polynucleotides, IgG, streptavidin, avidin, streptactin, micelles, cells, polymers, dextran, polysaccharides, beads and other types of solid support, and small organic molecules carrying reactive groups or carrying chemical motifs that can bind MHC/peptide monomers. In one aspect, the multimer comprises no more than 30 MHC/peptide monomers in total, such as no more than 25 MHC/peptide monomers, such as no more than 20 MHC/peptide monomers, such as no more than 15 MHC/peptide monomers, or no more than 10 MHC/peptide monomers in total. In one aspect, the MHC/peptide multimer comprises from 2 to 50 MHC/peptide monomers, such as from 2 to 4 MHC/peptide monomers, such as from 4 to 6 MHC/peptide monomers, such as from 6 to 8 MHC/peptide monomers, such as from 8 to 10 MHC/peptide monomers, such as from 10 to 12 MHC/peptide monomers, such as from 12 to 14 MHC/peptide monomers, such as from 14 to 16 MHC/peptide monomers, such as from 16 to 18 MHC/peptide monomers, such as from 18 to 20 MHC/peptide monomers, such as from 20 to 25 MHC/peptide monomers, such as from 25 to 30 MHC/peptide monomers, such as from 30 to 40 MHC/peptide monomers, such as from 40 to 50 MHC/peptide monomers, such as from 10 to 20 MHC/peptide monomers or any combination of these intervals. In one aspect, MHC/peptide multimer comprises at least 2, 3, 4, 5, 6, 7, 8, 9, 10, 11, 12, 13, 14, 15, 16, 17, 18, 19, 20, 21, 22, 23, 24 or 25 MHC/peptide monomers or has 2, 3, 4, 5, 6, 7, 8, 9, 10, 11, 12, 13, 14, 15, 16, 17, 18, 19, 20, 21, 22, 23, 24 or 25 MHC/peptide monomers in total. In one aspect, MHC/peptide multimer comprises MHC Class I/peptide monomers or wherein all MHC monomers of the MHC/peptide multimer are MHC Class I/peptide monomers. In one aspect, MHC/peptide multimer comprises MHC Class II/peptide monomers or wherein all MHC/peptide monomers of the MHC/peptide multimer are MHC Class II/peptide monomers. In one aspect, MHC/peptide multimer comprises MHC Class I/peptide and MHC Class II/peptide monomers or wherein all MHC/peptide monomers of the MHC/peptide multimer are either MHC Class I/peptide monomers or MHC Class II/peptide monomers. In one aspect, some of the MHC/peptide monomers or all of the MHC/peptide monomers have identical peptides. In one aspect, some of the MHC/peptide monomers or all of the MHC/peptide monomers have different peptides. In one aspect, at least 2, such as at least 3, 4, 5, 6, 7, 8, 9, 10, 11, 12, 13, 1, 15, 16, 17, 18, 19 or 20 of the MHC/peptide monomers comprise different peptides. In one aspect, the MHC/peptide multimer further comprise one or more labels such as at least two labels. In one aspect, the labels are different or at least some of the labels are different. In one aspect, the labels comprise at least one fluorescent label. In one aspect, the labels comprise at least one oligonucleotide label such as a nucleic acid molecule comprises or consists of DNA, RNA, and/or artificial nucleotides such as PLA or LNA. In one aspect, labels comprise at least one fluorescent label and at least one oligonucleotide label. In one aspect, the label is a oligonucleotide comprising one or more of: barcode region, 5′ first primer region (forward), 3′ second primer region (reverse), random nucleotide region, connector molecule, stability-increasing components, short nucleotide linkers in between any of the above-mentioned components, adaptors for sequencing, and annealing region. In one aspect, the labels comprise at least one such as one or more labels selected from the group consisting of APC, APC-Cy7, ABC-H7, APC-R700, Alexa Flours™ 488, Alexa Flours™555, Alexa Flours™647, Alexa Flours™700, AmCyan, BB151, BB700, BUV395, BUV496, BUV563, BUV615, BUV661, BUV737, BUV805, BV421, BV480, BV510, BV605, BV711, BV750, BV786, FITC, PE, PE-CF594, PE-Cy5, PE-CY5.5, PE-cy7, Pasific Blue, PERCP, pPerCp-Cy5.5, PE, R718, RY586, V450, V500, cFluor®B515, cFluor®B532, cFluor®B548, cFluor®B675, cFluor®B690, cFluor®BY575, cFluor®BY610, cFluor®BY667, cFluor®BY710, cFluor®BY750, cFluor®BY781, cFluor®B250, cFluor®R659, cFluor®R668, cFluor®R685, cFluor®R720, cFluor®R780, cFluor®R840, cFluor®v420, cFluor®v547, cFluor®v450, cFluor®v610 and cFluor®YG610. In one aspect, the one or more labels is a chemiluminescent label such as a label selected from the group consisting of luminol, isoluminol, theromatic acridinium ester, imidazole, acridinium salt and oxalate ester. In one aspect, one or more labels is a bioluminescent label such as a label selected from the group consisting of luciferin, luciferase and aequorin. In one aspect, the one or more labels is an enzyme label, such as an enzyme label selected from the group peroxidases, malate dehydrogenase, staphylococcal nuclease, delta-5-steroid isomerase, yeast alcohol dehydrogenase, alpha-glycerophosphate, dehydrogenase, triose phosphate isomerase, horseradish peroxidase, alkaline phosphatase, asparaginase, glucose oxidase, beta-galactosidase, ribonuclease, urease, catalase, glucose-6-phosphate dehydrogenase, glucoamylase and acetylcholinesterase. In one aspect, the one or more labels is a chromophore label. In one aspect, the one or more labels is a metal label. In one aspect, the one or more labels is a radioactive label such as a label selected from the group consisting of a radionuclide, an isotope, a label comprising α rays, a label comprising β rays or a label comprising γ rays.

[0035] As embodied and broadly described herein, an aspect of the present disclosure relates to a composition comprising at least two MHC/peptide multimers describe hereinabove, such as at least 2, 3, 4, 5, 6, 7, 8, 9, 10, 20, 30, 40, 50, 100 or 1000 MHC/peptide multimers. In one aspect, composition comprises different MHC/peptide multimers, such as at least 2, 3, 4, 5, 6, 7, 8, 9, 10, 15, 20, 25, 50, 100, 500 or 1000 different MHC/peptide multimers. In another aspect, at least 2, 3, 4, 5, 6, 7, 8, 9, 10, 20, 30, 40, 50, 100 or 1000 MHC/peptide multimers of the composition are different each comprising one or more peptides selected from one or more of the following groups: i) one or more peptides derived from SARS-CoV-2 B.1.1.7, such as one or more SARS-CoV-2 B.1.1.7 derived peptides set forth in Tables 1 to 10 (SEQ ID NOS: 1 to 3522), such as one or more peptides set forth in Table 1, such as one or more peptides set forth in Table 2, such as one or more peptides set forth in Table 3, such as one or more peptides set forth in Table 4, such as one or more peptides set forth in Table 5, such as one or more peptides set forth in Table 6, such as one or more peptides set forth in Table 7, such as one or more peptides set forth in Table 8, such as one or more peptides set forth in Table 9 and/or such as one or more peptides set forth in Table 10, or any combination thereof, ii) one or more peptides derived from SARS-CoV-2 B1.351. such as one or more SARS-CoV-2 B1.351 derived peptides set forth in Tables 1 to 10 (SEQ ID NOS: 1 to 3522), iii) one or more peptides derived from SARS-CoV-2 P.1, such as one or more SARS-CoV-2 P.1 derived peptides set forth in Tables 1 to 10 (SEQ ID NOS: 1 to 3522), iv) one or more peptides derived from SARS-CoV-2 CAL.20C, such as one or more SARS-CoV-2 CAL.20C derived peptides set forth in Tables 1 to 10 (SEQ ID NOS: 1 to 3522), v) one or more peptides set forth in Tables 1 to 10 (SEQ ID NOS: 1 to 3522), vi) one or more peptides derived from the SARS-CoV-2 Spike (S) protein such as one or more SARS-CoV-2 Spike (S) protein derived peptides set forth in Tables 1 to 10 (SEQ ID NOS: 1 to 3522), vii) one or more peptides derived from the SARS-CoV-2 Membrane (M) protein such as one or more SARS-CoV-2 Membrane (M) protein derived peptides set forth in Tables 1 to 10 (SEQ ID NOS: 1 to 3522), viii) one or more peptides derived from the SARS-CoV-2 Nucleocapsid (N) protein such as one or more SARS-CoV-2 Nucleocapsid (N) protein derived peptides set forth in Tables 1 to 10 (SEQ ID NOS: 1 to 3522), ix) one or more peptides derived from the SARS-CoV-2 Envelope (E) protein such as one or more SARS-CoV-2 Envelope (E) protein derived peptides set forth in Tables 1 to 10 (SEQ ID NOS: 1 to 3522), x) one or more peptides derived from the SARS-CoV-2 ORF3a protein such as one or more SARS-CoV-2 ORF3a protein derived peptides set forth in Tables 1 to 10 (SEQ ID NOS: 1 to 3522), xi) one or more peptides derived from the SARS-CoV-2 ORF6 protein such as one or more SARS-CoV-2 ORF6 protein derived peptides set forth in Tables 1 to 10 (SEQ ID NOS: 1 to 3522), xii) one or more peptides derived from the SARS-CoV-2 ORF7a protein such as one or more SARS-CoV-2 ORF7a protein derived peptides set forth in Tables 1 to 10 (SEQ ID NOS: 1 to 3522), xiii) one or more peptides derived from the SARS-CoV-2 ORF7b protein such as one or more SARS-CoV-2 ORF7b protein derived peptides set forth in Tables 1 to 10 (SEQ ID NOS: 1 to 3522), xiv) one or more peptides derived from the SARS-CoV-2 ORF8 protein such as one or more SARS-CoV-2 ORF8 protein derived peptides set forth in Tables 1 to 10 (SEQ ID NOS: 1 to 3522), xv) one or more peptides derived from the SARS-CoV-2 ORF10 protein such as one or more SARS-CoV-2 ORF10 protein derived peptides set forth in Tables 1 to 10 (SEQ ID NOS: 1 to 3522), xvi) one or more peptides derived from the SARS-CoV-2 nsp1 protein such as one or more SARS-CoV-2 nsp1 protein derived peptides Tables 1 to 10 (SEQ ID NOS: 1 to 3522), xvii) one or more peptides derived from the SARS-CoV-2 nsp2 protein such as one or more SARS-CoV-2 nsp2 protein derived peptides set forth in Tables 1 to 10 (SEQ ID NOS: 1 to 3522), xviii) one or more peptides derived from the SARS-CoV-2 nsp3 protein such as one or more SARS-CoV-2 nsp3 protein derived peptides set forth in Tables 1 to 10 (SEQ ID NOS: 1 to 3522), xix) one or more peptides derived from the SARS-CoV-2 nsp4 protein such as one or more SARS-CoV-2 nsp4 protein derived peptides set forth in Tables 1 to 10 (SEQ ID NOS: 1 to 3522), xx) one or more peptides derived from the SARS-CoV-2 nsp5 protein such as one or more SARS-CoV-2 nsp5 protein derived peptides set forth in Tables 1 to 10 (SEQ ID NOS: 1 to 3522), xxi) one or more peptides derived from the SARS-CoV-2 nsp6 protein such as one or more SARS-CoV-2 nsp6 protein derived peptides set forth in Tables 1 to 10 (SEQ ID NOS: 1 to 3522), xxii) one or more peptides derived from the SARS-CoV-2 nsp7 protein such as one or more SARS-CoV-2 nsp7 protein derived peptides set forth in Tables 1 to 10 (SEQ ID NOS: 1 to 3522), xxiii) one or more peptides derived from the SARS-CoV-2 nsp8 protein such as one or more SARS-CoV-2 nsp8 protein derived peptides set forth in Tables 1 to 10 (SEQ ID NOS: 1 to 3522), xxiv) one or more peptides derived from the SARS-CoV-2 nsp9 protein such as one or more SARS-CoV-2 nsp9 protein derived peptides set forth in Tables 1 to 10 (SEQ ID NOS: 1 to 3522), xxv) one or more peptides derived from the SARS-CoV-2 nsp10 protein such as one or more SARS-CoV-2 nsp10 protein derived peptide set forth in Tables 1 to 10 (SEQ ID NOS: 1 to 3522), xxvi) one or more peptides derived from the SARS-CoV-2 nsp12 protein such as one or more SARS-CoV-2 nsp12 protein derived peptides set forth in Tables 1 to 10 (SEQ ID NOS: 1 to 3522), xxvii) one or more peptides derived from the SARS-CoV-2 nsp13 protein such as one or more SARS-CoV-2 nsp13 protein derived peptides set forth in Tables 1 to 10 (SEQ ID NOS: 1 to 3522), xxviii) one or more peptides derived from the SARS-CoV-2 nsp14 protein such as one or more SARS-CoV-2 nsp14 protein derived peptides set forth in Tables 1 to 10 (SEQ ID NOS: 1 to 3522), xxix) one or more peptides derived from the SARS-CoV-2 nsp15 protein such as one or more SARS-CoV-2 nsp15 protein derived peptides set forth in Tables 1 to 10 (SEQ ID NOS: 1 to 3522), and xxx) one or more peptides derived from the SARS-CoV-2 nsp16 protein such as one or more SARS-CoV-2 nsp16 protein derived peptides set forth in Tables 1 to 10 (SEQ ID NOS: 1 to 3522).

[0036] As embodied and broadly described herein, an aspect of the present disclosure relates to a method for monitoring an immune response relevant to a coronavirus infection comprising one or more steps of: i) providing one or more MHC/peptide multimers describe hereinabove, ii) providing a sample comprising a population of T cells, and iii) measuring the presence, frequency, number, activity and/or state of T cells specific for said one or more MHC/peptide multimers, thereby monitoring said immune response relevant to a coronavirus infection.

[0037] As embodied and broadly described herein, an aspect of the present disclosure relates to a method for diagnosing a coronavirus infection comprising one or more steps of: i) providing one or more MHC/peptide multimers of any of the compositions described hereinabove, ii) providing a sample comprising a population of T cells, and iii) measuring the presence, frequency, number, activity and/or state of T cells specific for said one or more MHC/peptide multimers, thereby diagnosing said coronavirus infection.

[0038] As embodied and broadly described herein, an aspect of the present disclosure relates to a method for isolation of one or more antigen-specific T cells, said method comprising one or more steps of:
[0039] i) providing a sample comprising a population of T cells, ii) providing one or more MHC/peptide multimers described hereinabove, iii) contacting said MHC/peptide multimers or composition with said sample comprising a population of T cells, and iv) isolating T cells specific for said MHC/peptide multimers or composition.

[0040] As embodied and broadly described herein, an aspect of the present disclosure relates to a method for detecting an antigen-specific T cell response comprising one or more steps of: i) providing a sample comprising a population of T cells, ii) providing one or more MHC/peptide multimers of any composition described hereinabove, iii) contacting said MHC/peptide multimers or composition with said sample, and iv) measuring the presence, frequency, number, activity and/or state of T cells specific for said MHC/peptide multimers or composition, thereby detecting said antigen-specific T cell response.

[0041] As embodied and broadly described herein, an aspect of the present disclosure relates to a method of distinguishing an immune response from a subject that has been: a) vaccinated against but not exposed to SARS-COV-2, b) exposed to SARS-COV-2 but not vaccinated against SARS-COV-2, c) vaccinated against and exposed to SARS-COV-2, or d) neither vaccinated against nor exposed to SARS-COV-2, the method comprising, consisting of, or consisting essentially of: contacting a biological sample from a subject with a composition described hereinabove; and determining if the composition elicits an immune response from the contacted cells, wherein the level of elicited immune response indicates whether the subject falls into category a), b), c), or d). In one aspect, determining whether the subject falls into category a), b), c), or d) further comprises determining whether the immune response is predominantly to a SARS-CoV-2 Spike protein, or is to one or more SARS-CoV-2antigens other than the Spike protein, wherein: i) a predominant response to SARS-CoV-2 Spike protein and minimal response to one or more SARS-CoV-2 antigens other than Spike is indicative that a subject falls into category a), ii) a response to coronavirus Spike protein and one or more SARS-CoV-2 antigens other than Spike is indicative that the subject falls into category b), iii) a strong response to SARS-CoV-2 Spike protein and one or more SARS-CoV-2 antigens other than Spike is indicative that the subject falls into category c), and iv) a weak or no response to SARS-CoV-2 Spike or one or more SARS-CoV-2 antigens other than Spike is indicative that the subject falls into category d). In one aspect, the SARS-CoV-2 Spike protein or SARS-CoV-2 antigen is a protein or peptide comprising an amino acid sequence set forth in Tables 1 to 10 (SEQ ID NOS: 1 to 3522). In another aspect, the sample comprises T cells. In another aspect, the response comprises inducing, increasing, promoting or stimulating anti-SARS-CoV-2 activity of T cells. In another aspect, the T cells are CD8+ or CD4+ T cells. In another aspect, the method comprises determining whether the subject has been infected by or exposed to SARS-CoV-2 more than once by determining if the subject elicits a secondary T cell immune response profile that is different from a primary T cell immune response profile. In another aspect, the method further comprises diagnosing a SARS-CoV-2 infection or exposure in a subject, the method comprising contacting a biological sample from a subject with a composition described hereinabove; and determining if the composition elicits a T cell immune response, wherein the T cell immune response identifies that the subject has been infected with or exposed to SARS-CoV-2. In another aspect, the method is conducted three or more days following the date of suspected infection by or exposure to a coronavirus.

### BRIEF DESCRIPTION OF THE DRAWINGS

[0042] For a more complete understanding of the features and advantages of the present invention, reference is now made to the detailed description of the invention along with the accompanying figures and in which:

[0043] FIGS. 1A to 1F show a non-limiting example of the Distribution of CD4 and CD8 epitopes by SARS-CoV-2 antigen. The fraction of known CD4 and CD8 epitopes derived from recognized SARS-CoV-2 antigens is shown in (FIG. 1A) and (FIG. 1), respectively. The number of epitopes derived from each antigen as a function of antigen size is plotted in panels (FIG. 1C) and (FIG. 1D) for CD4 and CD8, respectively; p values were calculated using a simple linear regression. Panels (FIG. 1E) and (FIG. 1F) indicated the number of studies that probed responses to each antigen.

[0044] FIGS. 2A to 2F show a non-limiting example of the identification of immunodominant antigenic regions. The IEDB's Immunome Browser tool was utilized to identify potential antigenic regions across the entire SARS-CoV-2 proteome. After searching for SARS-CoV-2-derived CD4 or CD8 epitopes, individual antigens were selected for further evaluation. From the antigen-specific Immunome Browser link, data was downloaded as an Excel file to obtain position-specific lower bound response frequency scores (RF), defined as the number of individuals and assays reporting positive responses to a peptide including that particular residue. For visualization, RF scores for each residue were recalculated to represent a sliding 10 residue window. Position specific RF values for CD4 (top) and CD8 (bottom) epitopes are shown for the most dominant antigens respectively, to include spike (FIG. 2A and FIG. 2B), M and N (FIG. 2C and FIG. 2D), nsp3 and nsp12 (FIG. 2E and FIG. 2F).

[0045] FIGS. 3A to 3D show a non-limiting example of the Defined HLA class I and class II restrictions. HLA restricted epitopes have been identified for 30 class I (FIG. 3A) and 45 class II (FIG. 3B) molecules. The number of epitopes associated with each allele is plotted. FIG. 3C shows CD8 responses and FIG. 3D shows CD4 responses induced by Spike CD8 and CD4 megapools, respectively.

[0046] FIGS. 4A to 4D. SARS-CoV-2-specific CD4+ and CD8+ T cell responses in the study groups SARS-CoV-2-specific T cell responses were measured as percentage of AIM+ (OX40+CD137+) CD4+ T cells or AIM+(CD69+CD137+) CD8+ T cells after stimulation of PBMCs with peptides pools encompassing spike only (Spike) MP or the experimentally defined CD4RE and CD8RE MPs representing all the proteome without spike. EVB MP was used as a control. Graphs show individual response of spike, CD4RE or CD8RE and the combination of both (Total CD4+ or Total CD8+) plotted as background subtracted (FIG. 4A, 4C) or as SI (FIG. 4B, 4D) against DMSO negative control. Geometric mean for the 4 different groups is shown. Kruskal-Wallis test adjusted with Dunn's test for multiple comparisons was performed and p values <0.05 considered statistically significant. I−V−, unexposed and unvaccinated (n=30); I+V−, infected and non-vaccinated (n=30); I+V+, infected and then vaccinated (n=30); I−V+, non-infected and vaccinated (n=30). Threshold of positivity (TP) is indicated. Median response, and the number or percentage of positive responding donors for each group is shown.

[0047] FIGS. 5A and 5B. COVID-19 clinical classification scheme using SARS-CoV-2-specific CD4+ T cell responses. CD4+ T cell responses to spike and CD4RE MPs were measured as percentage of AIM+(OX40+CD137+) CD4+ T cells and plotted in two dimensions as absolute magnitude in order to discriminate the 4 study groups with known COVID-19 status of infection, and/or vaccination in 2 independent cohorts: (FIG. 5A) Exploratory cohort (n=120) and (FIG. 5B) Validation cohort (n=96). I−V−, unexposed and unvaccinated (n=30 and n=20); I+V−, infected and non-vaccinated (n=30 and n=20); I+V+, infected and then vaccinated (n=30 and n=20); I−V+, non-infected and vaccinated (n=30 and n=36). Dotted lines indicate specific cutoffs. Table inserts depict the diagnostic exam results in 4×4 matrix. Sensitivity, specificity, PPV, NPV and overall percentage of subjects classified correctly is shown.

[0048] FIGS. 6A to 6C COVID-19 clinical classification scheme is applicable to different mRNA vaccines and different lengths of time post-infection/post-vaccination. CD4+ T cell responses to spike and CD4RE MPs were measured as percentage of AIM+(OX40+CD137+) CD4+ T cells and plotted in two dimensions as absolute magnitude in order to discriminated between: (FIG. 6A) different types of mRNA vaccines (Moderna vs Pfzier) among vaccinated groups (I-V+ and I+V+); (FIG. 6B) different lengths of time post-infection among infected groups (I+V− and I+V+); (FIG. 6C) different lengths of time post-vaccination among vaccinated groups (I−V+ and I+V+). Early infection: PSO≤180; Late infection: PSO≥180; Early post-vaccination: PVD≤30; Late post-vaccination: PVD>30. I−V+, non-infected and vaccinated (n=66); I+V−, infected and non-vaccinated (n=50); I+V+, infected and then vaccinated (n=50). Dotted lines indicate specific cutoffs. Table inserts depict the overall percentage of subjects classified correctly.

[0049] FIGS. 7A to 7D. SARS-CoV-2 T cell and antibody response in breakthrough infection cases. Comparison to other study groups SARS-CoV-2-specific T cell responses were measured as percentage of (FIG. 7A) AIM+(OX40+CD137+) CD4+ T cells or (FIG. 7B) AIM+(CD69+CD137+) CD8+ T cells after stimulation of PBMCs with Spike and CD4RE or CD8RE peptide pools. (FIG. 7C) Comparison of anti-spike RBD IgG titers in the plasma of the different study groups. For both T cell and antibody determinations only donors matching the V+I+ intervals of vaccination and infection (55-271 and 18-93 days, respectively) were plotted. Graph bars show geometric mean. Threshold of positivity (TP), median response, and the number or percentage of positive responding donors for each group is indicated. Kruskal-Wallis test adjusted with Dunn's test for multiple comparisons was performed and p values <0.05 considered statistically significant. (FIG. 7D) V+I+CD4+ T cell responses plotted using the two-dimensional classification scheme with the specific cutoffs attributed to the different study groups (dotted lines). Unexposed and unvaccinated (n=50); I+V−, infected and non-vaccinated (n=50); I+V+, infected and then vaccinated (n=50); I-V+, non-infected and vaccinated (n=66); V+I+, vaccinated and then infected (n=23).

[0050] FIGS. 8A and 8B. Overall COVID-19 clinical classification scheme. CD4+ T cell responses to spike and CD4RE MPs were measured as percentage of AIM+(OX40+CD137+) CD4+ T cells and plotted in two dimensions as (FIG. 8A) SFCs per million PBMCs or (FIG. 8B) stimulation index (SI), in order to discriminate the 5 study groups with known COVID-19 status of infection, and/or vaccination. I−V−, unexposed and unvaccinated (n=50); I+V−, infected and non-vaccinated (n=50); I−V+, non-infected and vaccinated (n=66); I+V+/V+I+, infected and then vaccinated (I+V+, n=50) merged with vaccinated and then infected (V+I+, n=23). Dotted lines indicate specific cutoffs. Table inserts depict the diagnostic exam results in 4×4 matrix. Sensitivity, specificity, PPV, NPV of all the subjects that participated in this study (n=239) and overall percentage classified correctly is shown.

### DETAILED DESCRIPTION OF THE INVENTION

[0051] While the making and using of various embodiments of the present invention are discussed in detail below, it should be appreciated that the present invention provides many applicable inventive concepts that can be embodied in a wide variety of specific contexts. The specific embodiments discussed herein are merely illustrative of specific ways to make and use the invention and do not delimit the scope of the invention. Numerous variations, changes, and substitutions will now occur to those skilled in the art without departing from the invention.

[0052] It should be understood that various alternatives to the embodiments of the invention described herein may be employed in practicing the invention. To facilitate the understanding of this invention, a number of terms are defined below. Terms defined herein have meanings as commonly understood by a person of ordinary skill in the areas relevant to the present invention. Terms such as “a”, “an” and “the” are not intended to refer to only a singular entity, but include the general class of which a specific example may be used for illustration. The terminology herein is used to describe specific embodiments of the invention, but their usage does not delimit the invention, except as outlined in the claims. Unless specifically stated or obvious from context, as used herein, the term “or” is understood to be inclusive.

[0053] As used herein, the term “gene” refers to a segment of DNA involved in producing a protein; it includes regions preceding and following the coding region (leader and trailer) as well as intervening sequences (introns) between individual coding segments (exons). The leader, the trailer as well as the introns include regulatory elements that are necessary during the transcription and the translation of a gene. Further, a “protein gene product” is a protein expressed from a particular gene.

[0054] As used herein, the terms “expression” or “expressed” reference to a gene means the transcriptional and/or translational product of that gene. The level of expression of a DNA molecule in a cell may be determined on the basis of either the amount of corresponding mRNA that is present within the cell or the amount of protein encoded by that DNA produced by the cell. The level of expression of non-coding nucleic acid molecules (e.g., sgRNA) may be detected by standard PCR or Northern blot methods well known in the art. See, Sambrook et al., 1989 Molecular Cloning: A Laboratory Manual, 18.1-18.88.

[0055] As used herein, the term “amino acid” refers to naturally occurring and synthetic amino acids, as well as amino acid analogs and amino acid mimetics that function in a manner similar to the naturally occurring amino acids. Naturally occurring amino acids are those encoded by the genetic code, as well as those amino acids that are later modified, e.g., hydroxyproline, γ-carboxyglutamate, and O-phosphoserine. Amino acid analogs refers to compounds that have the same basic chemical structure as a naturally occurring amino acid, i.e., an a carbon that is bound to a hydrogen, a carboxyl group, an amino group, and an R group, e.g., homoserine, norleucine, methionine sulfoxide, methionine methyl sulfonium. Such analogs have modified R groups (e.g., norleucine) or modified peptide backbones, but retain the same basic chemical structure as a naturally occurring amino acid. Amino acid mimetics refers to chemical compounds that have a structure that is different from the general chemical structure of an amino acid, but that functions in a manner similar to a naturally occurring amino acid. The terms “non-naturally occurring amino acid” and “unnatural amino acid” refer to amino acid analogs, synthetic amino acids, and amino acid mimetics which are not found in nature.

[0056] Amino acids may be referred to herein by either their commonly known three letter symbols or by the one-letter symbols recommended by the IUPAC-IUB Biochemical Nomenclature Commission. Nucleotides, likewise, may be referred to by their commonly accepted single-letter codes.

[0057] As used herein, the terms “polypeptide,” “peptide,” and “protein” are used interchangeably herein to refer to a polymer of amino acid residues, wherein the polymer may, in embodiments, be conjugated to a moiety that does not consist of amino acids. The terms apply to amino acid polymers in which one or more amino acid residue is an artificial chemical mimetic of a corresponding naturally occurring amino acid, as well as to naturally occurring amino acid polymers and non-naturally occurring amino acid polymers. A “fusion protein” refers to a chimeric protein encoding two or more separate protein sequences that are recombinantly expressed as a single moiety.

[0058] Proteins and peptides include isolated and purified forms. Proteins and peptides also include those immobilized on a substrate, as well as amino acid sequences, subsequences, portions, homologues, variants, and derivatives immobilized on a substrate.

[0059] Proteins and peptides can be included in compositions, for example, a pharmaceutical composition. In particular embodiments, a pharmaceutical composition is suitable for specific or non-specific immunotherapy or is a vaccine composition.

[0060] Isolated nucleic acid (including isolated nucleic acid) encoding the proteins and peptides are also provided. Cells expressing a protein or peptide are further provided. Such cells include eukaryotic and prokaryotic cells, such as mammalian, insect, fungal and bacterial cells.

[0061] Methods and uses and medicaments of proteins and peptides of the invention are included. Such methods, uses and medicaments include modulating immune activity of a cell against a pathogen, for example, a bacteria or virus.

[0062] As used herein, the term “peptide mimetic” or “peptidomimetic” refer to protein-like chain designed to mimic a peptide or protein. Peptide mimetics may be generated by modifying an existing peptide or by designing a compound that mimic peptides, including peptoids and β-peptides.

[0063] As used herein, the phrase “conservatively modified variants” applies to both amino acid and nucleic acid sequences. With respect to particular nucleic acid sequences, “conservatively modified variants” refers to those nucleic acids that encode identical or essentially identical amino acid sequences. Because of the degeneracy of the genetic code, a number of nucleic acid sequences will encode any given protein. For instance, the codons GCA, GCC, GCG and GCU all encode the amino acid alanine. Thus, at every position where an alanine is specified by a codon, the codon can be altered to any of the corresponding codons described without altering the encoded polypeptide. Such nucleic acid variations are “silent variations,” which are one species of conservatively modified variations. Every nucleic acid sequence herein which encodes a polypeptide also describes every possible silent variation of the nucleic acid. One of skill will recognize that each codon in a nucleic acid (except AUG, which is ordinarily the only codon for methionine, and TGG, which is ordinarily the only codon for tryptophan) can be modified to yield a functionally identical molecule. Accordingly, each silent variation of a nucleic acid which encodes a polypeptide is implicit in each described sequence.

[0064] As to amino acid sequences, one of skill will recognize that individual substitutions, deletions or additions to a nucleic acid, peptide, polypeptide, or protein sequence which alters, adds or deletes a single amino acid or a small percentage of amino acids in the encoded sequence is a “conservatively modified variant” where the alteration results in the substitution of an amino acid with a chemically similar amino acid. Conservative substitution tables providing functionally similar amino acids are well known in the art. Such conservatively modified variants are in addition to and do not exclude polymorphic variants, interspecies homologs, and alleles of the disclosure. The following eight groups each contain amino acids that are conservative substitutions for one another: (1) Alanine (A), Glycine (G); (2) Aspartic acid (D), Glutamic acid (E); (3) Asparagine (N), Glutamine (Q); (4) Arginine (R), Lysine (K); (5) Isoleucine (I), Leucine (L), Methionine (M), Valine (V); (6) Phenylalanine (F), Tyrosine (Y), Tryptophan (W); (7) Serine (S), Threonine (T); and (8) Cysteine (C), Methionine (M) (see, e.g., Creighton, Proteins (1984)).

[0065] As used herein, a “percentage of sequence identity” is determined by comparing two optimally aligned sequences over a comparison window, wherein the portion of the polynucleotide or polypeptide sequence in the comparison window may comprise additions or deletions (i.e., gaps) as compared to the reference sequence (which does not comprise additions or deletions) for optimal alignment of the two sequences. The percentage is calculated by determining the number of positions at which the identical nucleic acid base or amino acid residue occurs in both sequences to yield the number of matched positions, dividing the number of matched positions by the total number of positions in the window of comparison and multiplying the result by 100 to yield the percentage of sequence identity.

[0066] As used herein, the terms “identical” or percent “identity” in the context of two or more nucleic acids or polypeptide sequences, refer to two or more sequences or subsequences that are the same or have a specified percentage of amino acid residues or nucleotides that are the same (i.e., about 60% identity, preferably 65%, 70%, 75%, 80%, 85%, 90%, 91%, 92%, 93%, 94%, 95%, 96%, 97%, 98%, 99%, or higher identity over a specified region, when compared and aligned for maximum correspondence over a comparison window or designated region) as measured using a BLAST or BLAST 2.0 sequence comparison algorithms with default parameters described below, or by manual alignment and visual inspection (see, e.g., NCBI web site ncbi.nlm.nih.gov/BLAST/or the like). Such sequences are then said to be “substantially identical.” This definition also refers to, or may be applied to, the compliment of a test sequence. The definition also includes sequences that have deletions and/or additions, as well as those that have substitutions. As described below, the preferred algorithms can account for gaps and the like. Preferably, identity exists over a region that is at least about 25 amino acids or nucleotides in length, or more preferably over a region that is 50-100 amino acids or nucleotides in length.

[0067] An amino acid or nucleotide base “position” is denoted by a number that sequentially identifies each amino acid (or nucleotide base) in the reference sequence based on its position relative to the N-terminus (or 5′-end). Due to deletions, insertions, truncations, fusions, and the like that must be taken into account when determining an optimal alignment, in general the amino acid residue number in a test sequence determined by simply counting from the N-terminus will not necessarily be the same as the number of its corresponding position in the reference sequence. For example, in a case where a variant has a deletion relative to an aligned reference sequence, there will be no amino acid in the variant that corresponds to a position in the reference sequence at the site of deletion. Where there is an insertion in an aligned reference sequence, that insertion will not correspond to a numbered amino acid position in the reference sequence. In the case of truncations or fusions there can be stretches of amino acids in either the reference or aligned sequence that do not correspond to any amino acid in the corresponding sequence.

[0068] As used herein, the terms “numbered with reference to” or “corresponding to,” when used in the context of the numbering of a given amino acid or polynucleotide sequence, refers to the numbering of the residues of a specified reference sequence when the given amino acid or polynucleotide sequence is compared to the reference sequence.

[0069] As used herein, the term “multimer” refers to a complex comprising multiple monomers (e.g., a protein complex) associated by covalent and/or noncovalent bonds. The monomers can be substantially identical monomers, or the monomers may be different. In embodiments, the multimer is a dimer, a trimer, a tetramer, or a pentamer.

[0070] As used herein, the term “Major Histocompatibility Complex” (MHC) is a generic designation meant to encompass the histocompatibility antigen systems described in different species including the human leucocyte antigens (HLA). Typically, MHC Class I or Class II multimers are well known in the art and include but are not limited to dimers, tetramers, pentamers, hexamers, heptamers and octamers.

[0071] As used herein, the term “MHC/peptide multimer” refers to a multimeric complex such as a stable multimeric complex composed of or comprising MHC protein(s) subunits loaded with a peptide (MHC/peptide monomers) of the present disclosure. For example, an MHC/peptide multimer (also called herein MHC/peptide complex) include, but are not limited to, an MHC/peptide dimer, trimer, tetramer, pentamer or higher valency multimer, e.g., comprising 2, 3, 4, 5, 6, 7, 8, 9, 10, 11, 12, 13, 14, 15, 16, 17, 18, 19, 20, 21, 22, 23, 24 or more than 24 MHC/peptide monomers. In humans there are three major different genetic loci that encode MHC class I molecules (the MHC molecules of the human are also designated human leukocyte antigens (HLA)): HLA-A, HLA-B, HLA-C, e.g., HLA-A*01, HLA-A*02, and HLA-A*11 are examples of different MHC class I alleles that can be expressed from these loci. Non-classical human MHC class I molecules such as HLA-E (homolog of mice Qa-1b) and MICA/B molecules are also encompassed by the present disclosure. In some embodiments, the MHC/peptide multimer is an HLA/peptide multimer selected from the group consisting of HLA-A/peptide multimer, HLA-B/peptide multimer, HLA-C/peptide multimer, HLA-E/peptide multimer, MICA/peptide multimer and MICB/peptide multimer.

[0072] In one embodiment the term “MHC/peptide multimer” refers to a complex comprising multiple MHC/peptide monomers (i.e., at least two MHC/peptide monomers) associated by covalent and/or noncovalent bonds. The MHC/peptide monomers can be substantially identical MHC/peptide monomers, or the MHC/peptide monomers may be different. In one embodiment the MHC/peptide multimer comprises a peptide comprising, consisting of, or consisting essentially of an amino acid sequence selected from those sequences set forth in Tables 1 to 10 (SEQ ID NOS: 1 to 3522), preferably in a groove of the MHC monomer. Each MHC/peptide monomer of the MHC/peptide multimer can be associated with one or more multimerization domains such as a multimerization domain selected from the group consisting of IgG, streptavidin, avidin, streptactin, micelles, cells, polymers, dextran, polysaccharides, beads and other types of solid support, and small organic molecules carrying reactive groups or carrying chemical motifs that can bind MHC complexes.

[0073] In one embodiment the MHC/peptide multimer comprises at least 2 MHC/peptide monomers, such as at least 3 MHC/peptide monomers such as at least 4 MHC/peptide monomers, such as at least 5 MHC/peptide monomers, such as at least 6 MHC/peptide monomers, such as at least 8 MHC/peptide monomers, such as at least 10 MHC/peptide monomers, such as at least 12 MHC/peptide monomers, such as at least 14 MHC/peptide monomers, such as at least 16 MHC/peptide monomers, such as at least 18 MHC/peptide monomers or such as at least 20 MHC/peptide monomers. In another embodiment the MHC/peptide multimer comprises from 2 to 50 MHC/peptide monomers, such as from 2 to 4 MHC/peptide monomers, such as from 4 to 6 MHC/peptide monomers, such as from 6 to 8 MHC/peptide monomers, such as from 8 to 10 MHC/peptide monomers, such as from 10 to 12 MHC/peptide monomers, such as from 12 to 14 MHC/peptide monomers, such as from 14 to 16 MHC/peptide monomers, such as from 16 to 18 MHC/peptide monomers, such as from 18 to 20 MHC/peptide monomers, such as from 20 to 25 MHC/peptide monomers, such as from 25 to 30 MHC/peptide monomers, such as from 30 to 40 MHC/peptide monomers, such as from 40 to 50 MHC/peptide monomers, or any combination of these intervals. In one aspect the MHC/peptide multimer comprises no more than 30 MHC/peptide monomers in total, such as no more than 25 MHC/peptide monomers, such as no more than 20 MHC/peptide monomers, such as no more than 15 MHC/peptide monomers, or no more than 10 MHC/peptide monomers in total.

[0074] In a specific embodiment, the MHC/peptide multimer comprises at least 2, 3, 4, 5, 6, 7, 8, 9, 10, 11, 12, 13, 14, 15, 16, 17, 18, 19, 20, 21, 22, 23, 24 or 25 MHC/peptide monomers or has 2, 3, 4, 5, 6, 7, 8, 9, 10, 11, 12, 13, 14, 15, 16, 17, 18, 19, 20, 21, 22, 23, 24 or 25 MHC/peptide monomers in total. The MHC/peptide multimer can comprise identical MHC/peptide monomers or all MHC/peptide monomers of the MHC/peptide multimer can be identical. In another embodiment the MHC/peptide multimer comprises different MHC/peptide monomers or all MHC/peptide monomers of the MHC/peptide multimer are different. The MHC/peptide multimer can comprise MHC Class I monomers or all MHC/peptide monomers of the MHC/peptide multimer can be MHC Class I monomers. Alternatively, the MHC/peptide multimer can comprise MHC Class II monomers or all MHC/peptide monomers of the MHC/peptide multimer can be MHC Class II monomers. In another embodiment the MHC/peptide multimer comprises MHC Class I and MHC Class II monomers or all MHC/peptide monomers of the MHC/peptide multimer are either MHC Class I monomers or MHC Class II monomers. In one embodiment some of the MHC/peptide monomers or all of the MHC/peptide monomers on a MHC/peptide multimer have identical peptides. In another embodiment some of the MHC/peptide monomers or all of the MHC/peptide monomers on a MHC/peptide multimer have different peptides. The MHC/peptide multimer can comprise at least 2, such as at least 3, 4, 5, 6, 7, 8, 9, 10, 11, 12, 13, 14, 15, 16, 17, 18, 19 or 20 MHC/peptide monomers which comprise different peptides.

[0075] The MHC/peptide multimer may comprise one or more labels such as at least two labels. These labels can all be different or identical or some the labels can be identical and some different. In one embodiment the labels comprise at least one fluorescent label and/or at least one oligonucleotide label. In a specific embodiment the at least one oligonucleotide on a MHC/peptide multimer comprises one or more of: barcode region, 5′ first primer region (forward), 3′ second primer region (reverse), random nucleotide region, connector molecule, stability-increasing components, short nucleotide linkers in between any of the above-mentioned components, adaptors for sequencing and annealing region. MHC/peptide multimers are described in detail in WO02072631, WO2008116468, WO2009003492 and WO2020127222, which hereby are incorporated by reference.

[0076] The present disclosure relates to peptide-major histocompatibility complex (MHC)/peptide multimers comprising at least two MHC/peptide monomers, wherein at least one MHC/peptide monomer comprises a peptide derived from SARS-CoV-2. In a preferred embodiment the MHC/peptide multimer comprises at least two MHC/peptide monomers, wherein at least one MHC/peptide monomer comprises a peptide that comprises, consists of, or consists essentially of an amino acid sequence selected from the sequences set forth in Tables 1 to 10 (SEQ ID NOS: 1 to 3522). The MHC/peptide multimer can comprise at least one MHC/peptide monomer comprising a peptide derived from SARS-CoV-2 Spike (S) protein such as a SARS-CoV-2 Spike (S) protein-derived peptide set forth in Tables 1 to 10 (SEQ ID NOS: 1 to 3522). The MHC/peptide multimer can comprise at least one MHC/peptide monomer comprising a peptide derived from SARS-CoV-2 Membrane (M) protein such as a SARS-CoV-2 Membrane (M) protein-derived peptide set forth in Tables 1 to 10 (SEQ ID NOS: 1 to 3522). The MHC/peptide multimer can comprise at least one MHC/peptide monomer comprising a peptide derived from SARS-CoV-2 Nucleocapsid (N) protein such as a SARS-CoV-2 Nucleocapsid (N) protein-derived peptide set forth in Tables 1 to 10 (SEQ ID NOS: 1 to 3522). The MHC/peptide multimer can comprise at least one MHC/peptide monomer comprising a peptide derived from SARS-CoV-2 Envelope (E) protein such as a SARS-CoV-2 Envelope (E) protein-derived peptide set forth in Tables 1 to 10 (SEQ ID NOS: 1 to 3522). The MHC/peptide multimer can comprise at least one MHC/peptide monomer comprising a peptide derived from SARS-CoV-2 ORF3a protein such as a SARS-CoV-2 ORF3a protein-derived peptide set forth in Tables 1 to 10 (SEQ ID NOS: 1 to 3522). The MHC/peptide multimer can comprise at least one MHC/peptide monomer comprising a peptide derived from SARS-CoV-2 ORF6 protein such as a SARS-CoV-2 ORF6 protein-derived peptide set forth in Tables 1 to 10 (SEQ ID NOS: 1 to 3522). The MHC/peptide multimer can comprise at least one MHC/peptide monomer comprising a peptide derived from SARS-CoV-2 ORF7a protein such as a SARS-CoV-2 ORF7a protein-derived peptide set forth in Tables 1 to 10 (SEQ ID NOS: 1 to 3522). The MHC/peptide multimer can comprise at least one MHC/peptide monomer comprising a peptide derived from SARS-CoV-2 ORF7b protein such as a SARS-CoV-2 ORF7b protein-derived peptide set forth in Tables 1 to 10 (SEQ ID NOS: 1 to 3522). The MHC/peptide multimer can comprise at least one MHC/peptide monomer comprising a peptide derived from SARS-CoV-2 ORF8 protein such as a SARS-CoV-2 ORF8 protein-derived peptide set forth in Tables 1 to 10 (SEQ ID NOS: 1 to 3522). The MHC/peptide multimer can comprise at least one MHC/peptide monomer comprising a peptide derived from SARS-CoV-2 ORF10 protein such as a SARS-CoV-2 ORF10 protein-derived peptide set forth in Tables 1 to 10 (SEQ ID NOS: 1 to 3522). The MHC/peptide multimer can comprise at least one MHC/peptide monomer comprising a peptide derived from SARS-CoV-2 nsp1 protein such as a SARS-CoV-2 nsp1 protein-derived peptide set forth in Tables 1 to 10 (SEQ ID NOS: 1 to 3522). The MHC/peptide multimer can comprise at least one MHC/peptide monomer comprising a peptide derived from SARS-CoV-2 nsp2 protein such as a SARS-CoV-2 nsp2 protein-derived peptide set forth in Tables 1 to 10 (SEQ ID NOS: 1 to 3522). The MHC/peptide multimer can comprise at least one MHC/peptide monomer comprising a peptide derived from SARS-CoV-2 nsp3 protein such as a SARS-CoV-2 nsp3 protein-derived peptide set forth in Tables 1 to 10 (SEQ ID NOS: 1 to 3522). The MHC/peptide multimer can comprise at least one MHC/peptide monomer comprising a peptide derived from SARS-CoV-2 nsp6 protein such as a SARS-CoV-2 nsp6 protein-derived peptide set forth in Tables 1 to 10 (SEQ ID NOS: 1 to 3522). The MHC/peptide multimer can comprise at least one MHC/peptide monomer comprising a peptide derived from SARS-CoV-2 nsp9 protein such as a SARS-CoV-2 nsp9 protein-derived peptide set forth in Tables 1 to 10 (SEQ ID NOS: 1 to 3522). The MHC/peptide multimer can comprise at least one MHC/peptide monomer comprising a peptide derived from SARS-CoV-2 nsp10 protein such as a SARS-CoV-2 nsp10 protein-derived peptide set forth in Tables 1 to 10 (SEQ ID NOS: 1 to 3522). The MHC/peptide multimer can comprise at least one MHC/peptide monomer comprising a peptide derived from SARS-CoV-2 nsp12 protein such as a SARS-CoV-2 nsp12 protein-derived peptide set forth in Tables 1 to 10 (SEQ ID NOS: 1 to 3522). The MHC/peptide multimer can comprise at least one MHC/peptide monomer comprising a peptide derived from SARS-CoV-2 nsp13 protein such as a SARS-CoV-2 nsp13 protein-derived peptide set forth in Tables 1 to 10 (SEQ ID NOS: 1 to 3522). The MHC/peptide multimer can comprise at least one MHC/peptide monomer comprising a peptide derived from SARS-CoV-2 nsp4 protein such as a SARS-CoV-2 nsp4 protein-derived peptide set forth in Tables 1 to 10 (SEQ ID NOS: 1 to 3522). The MHC/peptide multimer can comprise at least one MHC/peptide monomer comprising a peptide derived from SARS-CoV-2 nsp5 protein such as a SARS-CoV-2 nsp5 protein-derived peptide set forth in Tables 1 to 10 (SEQ ID NOS: 1 to 3522). The MHC/peptide multimer can comprise at least one MHC/peptide monomer comprising a peptide derived from SARS-CoV-2 nsp14 protein such as a SARS-CoV-2 nsp14 protein-derived peptide set forth in Tables 1 to 10 (SEQ ID NOS: 1 to 3522). The MHC/peptide multimer can comprise at least one MHC/peptide monomer comprising a peptide derived from SARS-CoV-2 nsp7 protein such as a SARS-CoV-2 nsp7 protein-derived peptide set forth in Tables 1 to 10 (SEQ ID NOS: 1 to 3522). The MHC/peptide multimer can comprise at least one MHC/peptide monomer comprising a peptide derived from SARS-CoV-2 nsp8 protein such as a SARS-CoV-2 nsp8 protein-derived peptide set forth in Tables 1 to 10 (SEQ ID NOS: 1 to 3522). The MHC/peptide multimer can comprise at least one MHC/peptide monomer comprising a peptide derived from SARS-CoV-2 nsp15 protein such as a SARS-CoV-2 nsp15 protein-derived peptide set forth in Tables 1 to 10 (SEQ ID NOS: 1 to 3522). The MHC/peptide multimer can comprise at least one MHC/peptide monomer comprising a peptide derived from SARS-CoV-2 nsp16 protein such as a SARS-CoV-2 nsp16 protein-derived peptide set forth in Tables 1 to 10 (SEQ ID NOS: 1 to 3522). The MHC/peptide multimer can comprise more than one of the different MHC/peptide monomers listed above, e.g., comprise at least 2, 3, 4, 5, 6, 7, 8, 9, 10 or more than 10 different MHC/peptide monomers by combining any of the above embodiments.

[0077] In certain embodiments, the at least two MHC/peptide monomers can be identical and/or different. In one embodiment the MHC/peptide multimer comprises some identical and some different MHC/peptide monomers or alternatively all the MHC/peptide monomers can be different. In a specific embodiment the MHC/peptide multimer comprises at least one MHC/peptide monomer which comprises a peptide comprising, consisting of, or consisting essentially of an amino acid sequence selected from the SARS-CoV-2 B.1.1.529 derived sequences set forth in Table 8 (SEQ ID NOS: 2571 to 2615). In a specific embodiment the MHC/peptide multimer comprises at least one MHC/peptide monomer which comprises a peptide comprising, consisting of, or consisting essentially of an amino acid sequence selected from the SARS-CoV-2 derived sequences set forth in Table 1 (SEQ ID NOS: 1 to 1468). In a specific embodiment the MHC/peptide multimer comprises at least one MHC/peptide monomer which comprises a peptide comprising, consisting of, or consisting essentially of an amino acid sequence selected from the SARS-CoV-2 derived sequences set forth in Table 2 (SEQ ID NOS: 1469 to 1521) (CD8S(D) megapool). In a specific embodiment the MHC/peptide multimer comprises at least one MHC/peptide monomer which comprises a peptide comprising, consisting of, or consisting essentially of an amino acid sequence selected from the SARS-CoV-2 derived sequences set forth in Table 3 (SEQ ID NOS: 1522 to 1665) (CD8S(ND) megapool). In a specific embodiment the MHC/peptide multimer comprises at least one MHC/peptide monomer which comprises a peptide comprising, consisting of, or consisting essentially of an amino acid sequence selected from the SARS-CoV-2 derived sequences set forth in Table 4 (SEQ ID NOS: 1666 to 1818) (CD8R (D) megapool). In a specific embodiment the MHC/peptide multimer comprises at least one MHC/peptide monomer which comprises a peptide comprising, consisting of, or consisting essentially of an amino acid sequence selected from the SARS-CoV-2 derived sequences set forth in Table 5 (SEQ ID NOS: 1819 to 2286) (CD8R (ND) megapool). In a specific embodiment the MHC/peptide multimer comprises at least one MHC/peptide monomer which comprises a peptide comprising, consisting of, or consisting essentially of an amino acid sequence selected from the SARS-CoV-2 derived sequences set forth in Table 6 (SEQ ID NOS: 2287 to 2355) (CD4R(D) megapool). In a specific embodiment the MHC/peptide multimer comprises at least one MHC/peptide monomer which comprises a peptide comprising, consisting of, or consisting essentially of an amino acid sequence selected from the SARS-CoV-2 derived sequences set forth in Table 7 (SEQ ID NOS: 2356 to 2570) (CD4R (ND) megapool). In a specific embodiment the MHC/peptide multimer comprises at least one MHC/peptide monomer which comprises a peptide comprising, consisting of, or consisting essentially of an amino acid sequence selected from the SARS-CoV-2 derived sequences set forth in Table 9 (SEQ ID NOS: 2616 to 2900) (CD4RE megapool). In a specific embodiment the MHC/peptide multimer comprises at least one MHC/peptide monomer which comprises a peptide comprising, consisting of, or consisting essentially of an amino acid sequence selected from the SARS-CoV-2 derived sequences set forth in Table 10 (SEQ ID NOS: 2901 to 3522) (CD8RE megapool).

[0078] In a further embodiment, the MHC/peptide multimer comprises at least one MHC/peptide monomer which comprises a peptide comprising, consisting of, or consisting essentially of an amino acid sequence selected from the SARS-CoV-2 derived sequences set forth in Tables 1 to 10 (SEQ ID NOS: 1 to 3522). The MHC/peptide multimer can comprise more than one of the different MHC/peptide monomers listed above, e.g., comprise at least 2, 3, 4, 5, 6, 7, 8, 9, 10 or more than 10 different MHC/peptide monomers by combining any of the above embodiments.

[0079] The MHC/peptide multimer can comprise at least 3, such as at least 4, 5, 6, 7, 8, 9, 10, 11, 12, 13, 14, 15, 16, 17, 18, 19 or 20 MHC/peptide monomers. The MHC/peptide multimer can in one embodiment comprise at least 3, such as at least 4, 5, 6, 7, 8, 9, 10, 11, 12, 13, 14, 15, 16, 17, 18, 19 or 20 identical MHC/peptide monomers. The MHC/peptide multimer can in another embodiment comprise at least 3, such as at least 4, 5, 6, 7, 8, 9, 10, 11, 12, 13, 14, 15, 16, 17, 18, 19 or 20 different MHC/peptide monomers. In a particular embodiment the MHC/peptide multimer comprises at least 3, such as at least 4, 5, 6, 7, 8, 9, 10, 11, 12, 13, 14, 15, 16, 17, 18, 19 or 20 of the MHC/peptide monomers which comprises a peptide which comprises, consists of, or consists essentially of an amino acid sequence selected from the sequences set forth in Tables 1 to 10 (SEQ ID NOS: 1 to 3522).

[0080] In a specific embodiment, the MHC/peptide multimer comprises at least 3, such as at least 4, 5, 6, 7, 8, 9, 10, 11, 12, 13, 14, 15, 16, 17, 18, 19 or 20 MHC/peptide monomers that comprises a peptide which comprises, consists of, or consists essentially of an amino acid sequence selected from the SARS-CoV-2 derived sequences set forth in Tables 1 to 10 (SEQ ID NOS: 1 to 3522). In another embodiment the MHC/peptide multimer comprises at least 3, such as at least 4, 5, 6, 7, 8, 9, 10, 11, 12, 13, 14, 15, 16, 17, 18, 19 or 20 MHC/peptide monomers that comprises a peptide which comprises, consists of, or consists essentially of an amino acid sequence selected from the SARS-CoV-2 B.1.1.529 derived sequences set forth in Table 8 (SEQ ID NOS: 2571 to 2615). In another embodiment the MHC/peptide multimer comprises at least 3, such as at least 4, 5, 6, 7, 8, 9, 10, 11, 12, 13, 14, 15, 16, 17, 18, 19 or 20 MHC/peptide monomers that comprises a peptide which comprises, consists of, or consists essentially of an amino acid sequence selected from the SARS-CoV-2 Spike (S) protein, Membrane (M) protein, Nucleocapsid (N) protein, Envelope (E) protein, ORF3a, ORF7a, ORF8, nsp1, nsp2, nsp3, nsp6, nsp9, nsp10, nsp12, nsp13, nsp14 and/or nsp15 derived sequences set forth in Tables 1 to 10 (SEQ ID NOS: 1 to 3522). The MHC/peptide multimer can comprise more than one of the different MHC/peptide monomers listed above, e.g., comprise at least 2, 3, 4, 5, 6, 7, 8, 9, 10 or more than 10 different MHC/peptide monomers by combining any of the above embodiments.

[0081] This disclosure further relates to a composition comprising at least two MHC/peptide multimers as described above, such as at least 3, 4, 5, 6, 7, 8, 9, 10, 20, 30, 40, 50, 100 or 1000 MHC/peptide multimers. The MHC/peptide multimers in the composition can all be identical or different. Alternatively, some MHC/peptide multimers in the composition are identical and some are different. The composition can comprise different MHC/peptide multimers, such as at least 2, 3, 4, 5, 6, 7, 8, 9, 10, 15, 20, 25, 50, 100, 500 or 1000 different MHC/peptide multimers. The composition can in one embodiment comprise at least 2, 3, 4, 5, 6, 7, 8, 9, 10, 20, 30, 40, 50, 100 or 1000 different MHC/peptide multimers each comprising one or more peptides selected from one or more such as 2, 3, 4, 5, 6, 7, 8, 9 or 10 of the following groups:
[0082] one or more peptides derived from SARS-CoV-2, such as one or more SARS-CoV-2 derived peptides set forth Tables 1 to 10 (SEQ ID NOS: 1 to 3522), such as one or more peptides set forth in Table 1, such as one or more peptides set forth in Table 2, such as one or more peptides set forth in Table 3, such as one or more peptides set forth in Table 4, such as one or more peptides set forth in Table 5, such as one or more peptides set forth in Table 6, such as one or more peptides set forth in Table 7, such as one or more peptides set forth in Table 8, such as one or more peptides set forth in Table 9 and/or such as one or more peptides set forth in Table 10, or any combination thereof,
[0083] one or more peptides derived from SARS-CoV-2, such as one or more SARS-CoV-2 derived peptides set forth Tables 1 to 10 (SEQ ID NOS: 1 to 3522),
[0084] one or more peptides set forth in Tables 1 to 10 (SEQ ID NOS: 1 to 3522),
[0085] one or more peptides derived from the SARS-CoV-2 Spike (S) protein such as one or more SARS-CoV-2 Spike (S) protein derived peptides set forth in Tables 1 to 10 (SEQ ID NOS: 1 to 3522),
[0086] one or more peptides derived from the SARS-CoV-2 Membrane (M) protein such as one or more SARS-CoV-2 Membrane (M) protein derived peptides set forth in Tables 1 to 10 (SEQ ID NOS: 1 to 3522),
[0087] one or more peptides derived from the SARS-CoV-2 Nucleocapsid (N) protein such as one or more SARS-CoV-2 Nucleocapsid (N) protein derived peptides set forth in Tables 1 to 10 (SEQ ID NOS: 1 to 3522),
[0088] one or more peptides derived from the SARS-CoV-2 Envelope (E) protein such as one or more SARS-CoV-2 Envelope (E) protein derived peptides set forth in Tables 1 to 10 (SEQ ID NOS: 1 to 3522),
[0089] one or more peptides derived from the SARS-CoV-2 ORF3a protein such as one or more SARS-CoV-2 ORF3a protein derived peptides set forth in Tables 1 to 10 (SEQ ID NOS: 1 to 3522),
[0090] one or more peptides derived from the SARS-CoV-2 ORF6 protein such as one or more SARS-CoV-2 ORF6 protein derived peptides set forth in Tables 1 to 10 (SEQ ID NOS: 1 to 3522),
[0091] one or more peptides derived from the SARS-CoV-2 ORF7a protein such as one or more SARS-CoV-2 ORF7a protein derived peptides set forth in Tables 1 to 10 (SEQ ID NOS: 1 to 3522),
[0092] one or more peptides derived from the SARS-CoV-2 ORF7b protein such as one or more SARS-CoV-2 ORF7b protein derived peptides set forth in Tables 1 to 10 (SEQ ID NOS: 1 to 3522),
[0093] one or more peptides derived from the SARS-CoV-2 ORF8 protein such as one or more SARS-CoV-2 ORF8 protein derived peptides set forth in Tables 1 to 10 (SEQ ID NOS: 1 to 3522),
[0094] one or more peptides derived from the SARS-CoV-2 ORF10 protein such as one or more SARS-CoV-2 ORF10 protein derived peptides set forth in Tables 1 to 10 (SEQ ID NOS: 1 to 3522),
[0095] one or more peptides derived from the SARS-CoV-2 nsp1 protein such as one or more SARS-CoV-2 nsp1 protein derived peptides set forth in Tables 1 to 10 (SEQ ID NOS: 1 to 3522),
[0096] one or more peptides derived from the SARS-CoV-2 nsp2 protein such as one or more SARS-CoV-2 nsp2 protein derived peptides set forth in Tables 1 to 10 (SEQ ID NOS: 1 to 3522),
[0097] one or more peptides derived from the SARS-CoV-2 nsp3 protein such as one or more SARS-CoV-2 nsp3 protein derived peptides set forth in Tables 1 to 10 (SEQ ID NOS: 1 to 3522),
[0098] one or more peptides derived from the SARS-CoV-2 nsp4 protein such as one or more SARS-CoV-2 nsp4 protein derived peptides set forth in Tables 1 to 10 (SEQ ID NOS: 1 to 3522),
[0099] one or more peptides derived from the SARS-CoV-2 nsp5 protein such as one or more SARS-CoV-2 nsp5 protein derived peptides set forth in Tables 1 to 10 (SEQ ID NOS: 1 to 3522),
[0100] one or more peptides derived from the SARS-CoV-2 nsp6 protein such as one or more SARS-CoV-2 nsp6 protein derived peptides set forth in Tables 1 to 10 (SEQ ID NOS: 1 to 3522),
[0101] one or more peptides derived from the SARS-CoV-2 nsp7 protein such as one or more SARS-CoV-2 nsp7 protein derived peptides set forth in Tables 1 to 10 (SEQ ID NOS: 1 to 3522),
[0102] one or more peptides derived from the SARS-CoV-2 nsp8 protein such as one or more SARS-CoV-2 nsp8 protein derived peptides set forth in Tables 1 to 10 (SEQ ID NOS: 1 to 3522),
[0103] one or more peptides derived from the SARS-CoV-2 nsp9 protein such as one or more SARS-CoV-2 nsp9 protein derived peptides set forth in Tables 1 to 10 (SEQ ID NOS: 1 to 3522),
[0104] one or more peptides derived from the SARS-CoV-2 nsp10 protein such as one or more SARS-CoV-2 nsp10 protein derived peptide set forth in Tables 1 to 10 (SEQ ID NOS: 1 to 3522),
[0105] one or more peptides derived from the SARS-CoV-2 nsp12 protein such as one or more SARS-CoV-2 nsp12 protein derived peptides set forth in Tables 1 to 10 (SEQ ID NOS: 1 to 3522),
[0106] one or more peptides derived from the SARS-CoV-2 nsp13 protein such as one or more SARS-CoV-2 nsp13 protein derived peptides set forth in Tables 1 to 10 (SEQ ID NOS: 1 to 3522),
[0107] one or more peptides derived from the SARS-CoV-2 nsp14 protein such as one or more SARS-CoV-2 nsp14 protein derived peptides set forth in Tables 1 to 10 (SEQ ID NOS: 1 to 3522),
[0108] one or more peptides derived from the SARS-CoV-2 nsp15 protein such as one or more SARS-CoV-2 nsp15 protein derived peptides set forth in Tables 1 to 10 (SEQ ID NOS: 1 to 3522) and
[0109] one or more peptides derived from the SARS-CoV-2 nsp16 protein such as one or more SARS-CoV-2 nsp16 protein derived peptides set forth in Tables 1 to 10 (SEQ ID NOS: 1 to 3522).

[0110] In one embodiment the composition comprises at least 1 such as at least 2, 3, 4, 5, 6, 7, 8, 9, 10, 20, 30, 40, 50, 100 or 1000 identical or different MHC/peptide multimers each comprising one or more peptides derived from SARS-CoV-2, such as one or more SARS-CoV-2 derived peptides set forth in Tables 1 to 10 (SEQ ID NOS: 1 to 3522). In one embodiment the composition comprises at least 1 such as at least 2, 3, 4, 5, 6, 7, 8, 9, 10, 20, 30, 40, 50, 100 or 1000 identical or different MHC/peptide multimers each comprising one or more peptides set forth in Tables 1 to 10 (SEQ ID NOS: 1 to 3522). In one embodiment the composition comprises at least 1 such as at least 2, 3, 4, 5, 6, 7, 8, 9, 10, 20, 30, 40, 50, 100 or 1000 identical or different MHC/peptide multimers each comprising one or more peptides derived from the SARS-CoV-2 Spike (S) protein such as one or more SARS-CoV-2 Spike (S) protein derived peptides set forth in Tables 1 to 10 (SEQ ID NOS: 1 to 3522). In one embodiment the composition comprises at least 1 such as at least 2, 3, 4, 5, 6, 7, 8, 9, 10, 20, 30, 40, 50, 100 or 1000 identical or different MHC/peptide multimers each comprising one or more peptides derived from the SARS-CoV-2 Membrane (M) protein such as one or more SARS-CoV-2 Membrane (M) protein derived peptides set forth in Tables 1 to 10 (SEQ ID NOS: 1 to 3522). In one embodiment the composition comprises at least 1 such as at least 2, 3, 4, 5, 6, 7, 8, 9, 10, 20, 30, 40, 50, 100 or 1000 identical or different MHC/peptide multimers each comprising one or more peptides derived from the SARS-CoV-2 Nucleocapsid (N) protein such as one or more SARS-CoV-2 Nucleocapsid (N) protein derived peptides set forth in Tables 1 to 10 (SEQ ID NOS: 1 to 3522). In one embodiment the composition comprises at least 1 such as at least 2, 3, 4, 5, 6, 7, 8, 9, 10, 20, 30, 40, 50, 100 or 1000 identical or different MHC/peptide multimers each comprising one or more peptides derived from the SARS-CoV-2 Envelope (E) protein such as one or more SARS-CoV-2 Envelope (E) protein derived peptides set forth in Tables 1 to 10 (SEQ ID NOS: 1 to 3522). In one embodiment the composition comprises at least 1 such as at least 2, 3, 4, 5, 6, 7, 8, 9, 10, 20, 30, 40, 50, 100 or 1000 identical or different MHC/peptide multimers each comprising one or more peptides derived from the SARS-CoV-2 ORF3a protein such as one or more SARS-CoV-2 ORF3a protein derived peptides set forth in Tables 1 to 10 (SEQ ID NOS: 1 to 3522). In one embodiment the composition comprises at least 1 such as at least 2, 3, 4, 5, 6, 7, 8, 9, 10, 20, 30, 40, 50, 100 or 1000 identical or different MHC/peptide multimers each comprising one or more peptides derived from the SARS-CoV-2 ORF7a protein such as one or more SARS-CoV-2 ORF7a protein derived peptides set forth in Tables 1 to 10 (SEQ ID NOS: 1 to 3522). In one embodiment the composition comprises at least 1 such as at least 2, 3, 4, 5, 6, 7, 8, 9, 10, 20, 30, 40, 50, 100 or 1000 identical or different MHC/peptide multimers each comprising one or more peptides derived from the SARS-CoV-2 ORF8 protein such as one or more SARS-CoV-2 ORF8 protein derived peptides set forth in Tables 1 to 10 (SEQ ID NOS: 1 to 3522). In one embodiment the composition comprises at least 1 such as at least 2, 3, 4, 5, 6, 7, 8, 9, 10, 20, 30, 40, 50, 100 or 1000 identical or different MHC/peptide multimers each comprising one or more peptides derived from the SARS-CoV-2 nsp1 protein such as one or more SARS-CoV-2 nsp1 protein derived peptides set forth in Tables 1 to 10 (SEQ ID NOS: 1 to 3522). In one embodiment the composition comprises at least 1 such as at least 2, 3, 4, 5, 6, 7, 8, 9, 10, 20, 30, 40, 50, 100 or 1000 identical or different MHC/peptide multimers each comprising one or more peptides derived from the SARS-CoV-2 nsp2 protein such as one or more SARS-CoV-2 nsp2 protein derived peptides set forth in Tables 1 to 10 (SEQ ID NOS: 1 to 3522). In one embodiment the composition comprises at least 1 such as at least 2, 3, 4, 5, 6, 7, 8, 9, 10, 20, 30, 40, 50, 100 or 1000 identical or different MHC/peptide multimers each comprising one or more peptides derived from the SARS-CoV-2 nsp3 protein such as one or more SARS-CoV-2 nsp3 protein derived peptides set forth in Tables 1 to 10 (SEQ ID NOS: 1 to 3522). In one embodiment the composition comprises at least 1 such as at least 2, 3, 4, 5, 6, 7, 8, 9, 10, 20, 30, 40, 50, 100 or 1000 identical or different MHC/peptide multimers each comprising one or more peptides derived from the SARS-CoV-2 nsp6 protein such as one or more SARS-CoV-2 nsp6 protein derived peptides set forth in Tables 1 to 10 (SEQ ID NOS: 1 to 3522). In one embodiment the composition comprises at least 1 such as at least 2, 3, 4, 5, 6, 7, 8, 9, 10, 20, 30, 40, 50, 100 or 1000 identical or different MHC/peptide multimers each comprising one or more peptides derived from the SARS-CoV-2 nsp9 protein such as one or more SARS-CoV-2 nsp9 protein derived peptides set forth in Tables 1 to 10 (SEQ ID NOS: 1 to 3522). In one embodiment the composition comprises at least 1 such as at least 2, 3, 4, 5, 6, 7, 8, 9, 10, 20, 30, 40, 50, 100 or 1000 identical or different MHC/peptide multimers each comprising one or more peptides derived from the SARS-CoV-2 nsp10 protein such as one or more SARS-CoV-2 nsp10 protein derived peptide set forth in Tables 1 to 10 (SEQ ID NOS: 1 to 3522). In one embodiment the composition comprises at least 1 such as at least 2, 3, 4, 5, 6, 7, 8, 9, 10, 20, 30, 40, 50, 100 or 1000 identical or different MHC/peptide multimers each comprising one or more peptides derived from the SARS-CoV-2 nsp12 protein such as one or more SARS-CoV-2 nsp12 protein derived peptides set forth in Tables 1 to 10 (SEQ ID NOS: 1 to 3522). In one embodiment the composition comprises at least 1 such as at least 2, 3, 4, 5, 6, 7, 8, 9, 10, 20, 30, 40, 50, 100 or 1000 identical or different MHC/peptide multimers each comprising one or more peptides derived from the SARS-CoV-2 nsp13 protein such as one or more SARS-CoV-2 nsp13 protein derived peptides set forth in Tables 1 to 10 (SEQ ID NOS: 1 to 3522). In one embodiment the composition comprises at least 1 such as at least 2, 3, 4, 5, 6, 7, 8, 9, 10, 20, 30, 40, 50, 100 or 1000 identical or different MHC/peptide multimers each comprising one or more peptides derived from the SARS-CoV-2 nsp14 protein such as one or more SARS-CoV-2 nsp14 protein derived peptides set forth in Tables 1 to 10 (SEQ ID NOS: 1 to 3522). In one embodiment the composition comprises at least 1 such as at least 2, 3, 4, 5, 6, 7, 8, 9, 10, 20, 30, 40, 50, 100 or 1000 identical or different MHC/peptide multimers each comprising one or more peptides derived from the SARS-CoV-2 nsp15 protein such as one or more SARS-CoV-2 nsp15 protein derived peptides set forth in Tables 1 to 10 (SEQ ID NOS: 1 to 3522). Any of the above composition embodiments can be combined in any order.

[0111] In humans, there are three major different genetic loci that encode MHC class II molecules: HLA-DR, HLA-DP, and HLA-DQ, each formed of two polypeptides, alpha and beta chains (A and B genes). For example, HLA-DQA1*01, HLA-DRB1*01, and HLA-DRB1*03 are different MHC class II alleles that can be expressed from these loci. It should be further noted that non-classical human MHC class II molecules such as HLA-DM and HL-DOA (homolog in mice is H2-DM and H2-0) are also encompassed by the present disclosure. In some embodiments, the MHC/peptide multimer is an HLA/peptide multimer selected from the group consisting of HLA-DP/peptide multimer, HLA-DQ/peptide multimer, HLA-DR/peptide multimer, HLA-DM/peptide multimer and HLA-DO/peptide multimer.

[0112] An MHC/peptide multimer may be a multimer where the heavy chain of the MHC is biotinylated, which allows combination as a tetramer with streptavidin. MHC-peptide tetramers have increased avidity for the appropriate T cell receptor (TCR) on T lymphocytes. The multimers can also be attached to paramagnetic particles or magnetic beads to facilitate removal of non-specifically bound reporter and cell sorting. Multimer staining does not kill the labelled cells, thus, cell integrity is maintained for further analysis. In some embodiments, the MHC/peptide multimer of the present disclosure is particularly suitable for isolating and/or identifying a population of CD8+ T cells having specificity for the peptide of the present disclosure (in a flow cytometry assay).

[0113] The peptides or MHC class I or class II multimer as described herein is particularly suitable for detecting T cells specific for one or more peptides of the present disclosure. The peptide(s) and/or the MHC/multimer complex of the present disclosure is particularly suitable for diagnosing coronavirus infection in a subject. For example, the method comprises obtaining a blood or PBMC sample obtained from the subject with an amount of a least peptide of the present disclosure and detecting at least one T cell displaying a specificity for the peptide. Another diagnostic method of the present disclosure involves the use of a peptide of the present disclosure that is loaded on multimers as described above, so that the isolated CD8+ or CD4+ T cells from the subject are brought into contact with the multimers, at which the binding, activation and/or expansion of the T cells is measured. For example, following the binding to antigen presenting cells, e.g., those having the MHC class I or class II multimer, the number of CD8+ and/or CD4+ cells binding specifically to the HLA-peptide multimer may be quantified by measuring the secretion of lymphokines/cytokines, division of the T cells, or standard flow cytometry methods, such as, for example, using fluorescence activated cell sorting (FACS). The multimers can also be attached to paramagnetic ferrous or magnetic beads to facilitate removal of non-specifically bound reporter and cell sorting.

[0114] The MHC class I or class II peptide multimers as described herein can also be used as therapeutic agents. The peptide and/or the MHC class I or class II peptide multimers of the present disclosure are suitable for treating or preventing a coronavirus infection in a subject. The MHC Class I or Class II multimers can be administered in soluble form or loaded on nanoparticles.

[0115] As used herein, the term “antibody” refers to a polypeptide encoded by an immunoglobulin gene or functional fragments thereof that specifically binds and recognizes an antigen. The recognized immunoglobulin genes include the kappa, lambda, alpha, gamma, delta, epsilon, and mu constant region genes, as well as the myriad immunoglobulin variable region genes. Light chains are classified as either kappa or lambda. Heavy chains are classified as gamma, mu, alpha, delta, or epsilon, which in turn define the immunoglobulin classes, IgG, IgM, IgA, IgD and IgE, respectively.

[0116] As used herein, the phrase “specifically (or selectively) binds” to an antibody or “specifically (or selectively) immunoreactive with,” when referring to a protein or peptide, refers to a binding reaction that is determinative of the presence of the protein or peptide, often in a heterogeneous population of proteins and other biologics. Thus, under designated immunoassay conditions, the specified antibodies bind to a particular protein at least two times the background and more typically more than 10 to 100 times background. Specific binding to an antibody under such conditions requires an antibody that is selected for its specificity for a particular protein. For example, polyclonal antibodies can be selected to obtain only a subset of antibodies that are specifically immunoreactive with the selected antigen and not with other proteins. This selection may be achieved by subtracting out antibodies that cross-react with other molecules. A variety of immunoassay formats may be used to select antibodies specifically immunoreactive with a particular protein. For example, solid-phase ELISA immunoassays are routinely used to select antibodies specifically immunoreactive with a protein (see, e.g., Harlow & Lane, Using Antibodies, A Laboratory Manual (1998) for a description of immunoassay formats and conditions that can be used to determine specific immunoreactivity).

[0117] Antibodies are large, complex molecules (molecular weight of ˜-150,000 or about 1320 amino acids) with intricate internal structure. A natural antibody molecule contains two identical pairs of polypeptide chains, each pair having one light chain and one heavy chain. Each light chain and heavy chain in turn consists of two regions: a variable (“V”) region involved in binding the target antigen, and a constant (“C”) region that interacts with other components of the immune system. The light and heavy chain variable regions come together in 3-dimensional space to form a variable region that binds the antigen (for example, a receptor on the surface of a cell). Within each light or heavy chain variable region, there are three short segments (averaging 10 amino acids in length) called the complementarity determining regions (“CDRs”). The six CDRs in an antibody variable domain (three from the light chain and three from the heavy chain) fold up together in 3-dimensional space to form the actual antibody binding site which docks onto the target antigen. The position and length of the CDRs have been precisely defined by Kabat, E. et al., Sequences of Proteins of Immunological Interest, U.S. Department of Health and Human Services, 1983, 1987. The part of a variable region not contained in the CDRs is called the framework (“FR”), which forms the environment for the CDRs.

[0118] As used herein, the term “antibody” is used according to its commonly known meaning in the art. Antibodies exist, e.g., as intact immunoglobulins or as a number of well-characterized fragments produced by digestion with various peptidases. Thus, for example, pepsin digests an antibody below the disulfide linkages in the hinge region to produce F(ab)′₂, a dimer of Fab which itself is a light chain joined to V_{H}-C_{H1} by a disulfide bond. The F(ab)′₂ may be reduced under mild conditions to break the disulfide linkage in the hinge region, thereby converting the F(ab)′₂ dimer into a Fab′ monomer. The Fab′ monomer is essentially Fab with part of the hinge region (see Fundamental Immunology (Paul ed., 3d ed. 1993). While various antibody fragments are defined in terms of the digestion of an intact antibody, one of skill will appreciate that such fragments may be synthesized de novo either chemically or by using recombinant DNA methodology. Thus, the term antibody, as used herein, also includes antibody fragments either produced by the modification of whole antibodies, or those synthesized de novo using recombinant DNA methodologies (e.g., single chain Fv) or those identified using phage display libraries (see, e.g., McCafferty et al., Nature 348:552-554 (1990)).

[0119] An exemplary immunoglobulin (antibody) structural unit comprises a tetramer. Each tetramer is composed of two identical pairs of polypeptide chains, each pair having one “light” (about 25 kD) and one “heavy” chain (about 50-70 kD). The N-terminus of each chain defines a variable region of about 100 to 110 or more amino acids primarily responsible for antigen recognition. The terms variable light chain (VL) and variable heavy chain (VH) refer to these light and heavy chains respectively. The Fc (i.e., fragment crystallizable region) is the “base” or “tail” of an immunoglobulin and is typically composed of two heavy chains that contribute two or three constant domains depending on the class of the antibody. By binding to specific proteins, the Fc region ensures that each antibody generates an appropriate immune response for a given antigen. The Fc region also binds to various cell receptors, such as Fc receptors, and other immune molecules, such as complement proteins.

[0120] As used herein, the term “antigen” and the term “epitope” refers to a molecule or substance capable of stimulating an immune response. In one example, epitopes include but are not limited to a polypeptide and a nucleic acid encoding a polypeptide, wherein expression of the nucleic acid into a polypeptide is capable of stimulating an immune response when the polypeptide is processed and presented on a Major Histocompatibility Complex (MHC) molecule. Generally, epitopes include peptides presented on the surface of cells non-covalently bound to the binding groove of Class I or Class II MHC, such that they can interact with T cell receptors and the respective T cell accessory molecules. However, antigens and epitopes also apply when discussing the antigen binding portion of an antibody, wherein the antibody binds to a specific structure of the antigen.

[0121] Proteolytic Processing of Antigens. Epitopes that are displayed by MHC on antigen presenting cells are cleavage peptides or products of larger peptide or protein antigen precursors. For MHC I epitopes, protein antigens are often digested by proteasomes resident in the cell. Intracellular proteasomal digestion produces peptide fragments of about 3 to 23 amino acids in length that are then loaded onto the MHC protein. Additional proteolytic activities within the cell, or in the extracellular milieu, can trim and process these fragments further. Processing of MHC Class II epitopes generally occurs via intracellular proteases from the lysosomal/endosomal compartment. The present disclosure includes, in one embodiment, pre-processed peptides that are attached to the anti-CD40 antibody (or fragment thereof) that directs the peptides against which an enhanced immune response is sought directly to antigen presenting cells.

[0122] The present disclosure includes methods for specifically identifying the epitopes within antigens most likely to lead to the immune response sought for the specific sources of antigen presenting cells and responder T cells.

[0123] As used herein, the term “T cell epitope” refers to a specific amino acid that when present in the context of a Major or Minor Histocompatibility Complex provides a reactive site for a T cell receptor. The T-cell epitopes or peptides that stimulate the cellular arm of a subject's immune system are short peptides of about 8-25 amino acids. T-cell epitopes are recognized by T cells from animals that are immune to the antigen of interest. These T-cell epitopes or peptides can be used in assays such as the stimulation of cytokine release or secretion or evaluated by constructing major histocompatibility (MHC) proteins containing or “presenting” the peptide. Such immunogenically active fragments are often identified based on their ability to stimulate lymphocyte proliferation in response to stimulation by various fragments from the antigen of interest.

[0124] As used herein, the term “immunological response” refers to an antigen or composition is the development in a subject of a humoral and/or a cellular immune response to an antigen present in the composition of interest. For purposes of the present disclosure, a “humoral immune response” refers to an immune response mediated by antibody molecules, while a “cellular immune response” is one mediated by T-lymphocytes and/or other white blood cells. One important aspect of cellular immunity involves an antigen-specific response by cytolytic T-cells (“CTLs”). CTLs have specificity for peptide antigens that are presented in association with proteins encoded by the major histocompatibility complex (MHC) and expressed on the surfaces of cells. CTLs help induce and promote the destruction of intracellular microbes, or the lysis of cells infected with such microbes. Another aspect of cellular immunity involves an antigen-specific response by helper T-cells. Helper T-cells act to help stimulate the function, and focus the activity of, nonspecific effector cells against cells displaying peptide antigens in association with MHC molecules on their surface. A “cellular immune response” also refers to the production of cytokines, chemokines and other such molecules produced by activated T-cells and/or other white blood cells, including those derived from CD4+ and CD8+ T-cells. Hence, an immunological response may include one or more of the following effects: the production of antibodies by B-cells; and/or the activation of effector and/or suppressor T-cells and/or gamma-delta T-cells directed specifically to an antigen or antigens present in the composition or vaccine of interest. These responses may serve to neutralize infectivity, and/or mediate antibody-complement, or antibody dependent cell cytotoxicity (ADCC) to provide protection to an immunized host. Such responses can be determined using standard immunoassays and neutralization assays, well known in the art.

[0125] As used herein, the term an “immunogenic composition” and “vaccine” refer to a composition that comprises an antigenic molecule where administration of the composition to a subject or patient results in the development in the subject of a humoral and/or a cellular immune response to the antigenic molecule of interest. “Vaccine” refers to a composition that can provide active acquired immunity to and/or therapeutic effect (e.g., treatment) of a particular disease or a pathogen. A vaccine typically contains one or more agents that can induce an immune response in a subject against a pathogen or disease, i.e., a target pathogen or disease. The immunogenic agent stimulates the body's immune system to recognize the agent as a threat or indication of the presence of the target pathogen or disease, thereby inducing immunological memory so that the immune system can more easily recognize and destroy any of the pathogen on subsequent exposure. Vaccines can be prophylactic (e.g., preventing or ameliorating the effects of a future infection by any natural or pathogen) or therapeutic (e.g., reducing symptoms or aberrant conditions associated with infection). The administration of vaccines is referred to vaccination.

[0126] In some examples, a vaccine composition can provide nucleic acid, e.g., mRNA that encodes antigenic molecules (e.g., peptides) to a subject. The nucleic acid that is delivered via the vaccine composition in the subject can be expressed into antigenic molecules and allow the subject to acquire immunity against the antigenic molecules. In the context of the vaccination against infectious disease, the vaccine composition can provide mRNA encoding antigenic molecules that are associated with a certain pathogen, e.g., one or more peptides that are known to be expressed in the pathogen (e.g., pathogenic bacterium or virus).

[0127] The present disclosure provides nucleic acid molecules, specifically polynucleotides, primary constructs and/or mRNA that encode one or more polynucleotides that express one or more peptides or proteins, comprising, consisting of, or consisting essentially of an amino acid sequence selected from those sequences set forth in Tables 1 to 10 (SEQ ID NOS: 1 to 3522), or a subsequence, portion, homologue, variant or derivative thereof for use in immune modulation. The term “nucleic acid” refers to any compound and/or substance that comprise a polymer of nucleotides, referred to herein as polynucleotides. Exemplary nucleic acids or polynucleotides of the disclosure include, but are not limited to, ribonucleic acids (RNAs), deoxyribonucleic acids (DNAs), threose nucleic acids (TNAs), glycol nucleic acids (GNAs), peptide nucleic acids (PNAs), locked nucleic acids (LNAs), including diastereomers of LNAs, functionalized LNAs, or hybrids thereof.

[0128] One method of immune modulation of the present disclosure includes direct or indirect gene transfer, i.e., local application of a preparation containing the one or more polynucleotides (DNA, RNA, mRNA, etc.) that expresses the one or more peptides or proteins, comprising, consisting of, or consisting essentially of an amino acid sequence selected from those sequences set forth in Tables 1 to 10 (SEQ ID NOS: 1 to 3522), or a subsequence, portion, homologue, variant or derivative thereof. A variety of well-known vectors can be used to deliver to cells the one or more polynucleotides or the peptides or proteins expressed by the polynucleotides, including but not limited to adenoviral vectors and adeno-associated vectors. In addition, naked DNA, liposome delivery methods, or other novel vectors developed to deliver the polynucleotides to cells can also be beneficial. Any of a variety of promoters can be used to drive peptide or protein expression, including but not limited to endogenous promoters, constitutive promoters (e.g., cytomegalovirus, adenovirus, or SV40), inducible promoters (e.g., a cytokine promoter such as the interleukin-1, tumor necrosis factor-alpha, or interleukin-6 promoter), and tissue specific promoters to express the immunogenic peptides or proteins of the present disclosure.

[0129] The immunization may include adenovirus, adeno-associated virus, herpes virus, vaccinia virus, retroviruses, or other viral vectors with the appropriate tropism for cells likely to present the antigenic peptide(s) or protein(s) may be used as a gene transfer delivery system for a therapeutic peptide(s) or protein(s), comprising, consisting of, or consisting essentially of an amino acid sequence selected from those sequences set forth in Tables 1 to 10 (SEQ ID NOS: 1 to 3522), or a subsequence, portion, homologue, variant or derivative thereof, gene expression construct. Viral vectors which do not require that the target cell be actively dividing, such as adenoviral and adeno-associated vectors, are particularly useful when the cells are accumulating, but not proliferative. Numerous vectors useful for this purpose are generally known (Miller, Human Gene Therapy 15-14, 1990; Friedman, Science 244:1275-1281, 1989; Eglitis and Anderson, BioTechniques 6:608-614, 1988; Tolstoshev and Anderson, Current Opinion in Biotechnology 1:55-61, 1990; Sharp, The Lancet 337:1277-1278, 1991; Cornetta et al., Nucleic Acid Research and Molecular Biology 36:311-322, 1987; Anderson, Science 226:401-409, 1984; Moen, Blood Cells 17:407-416, 1991; and Miller and Rosman, Bio Techniques 7:980-990, 1989; Le Gal La Salle et al., Science 259:988-990, 1993; and Johnson, Chest 107:77S-83S, 1995). Retroviral vectors are particularly well developed and have been used in clinical settings (Rosenberg et al., N. Engl. J. Med 323:370, 1990; Anderson et al., U.S. Pat. No. 5,399,346).

[0130] The immunization may also include inserting the one or more polynucleotides (DNA, RNA, mRNA, etc.) that express the one or more peptides or proteins, comprising, consisting of, or consisting essentially of an amino acid sequence selected from those sequences set forth in Tables 1 to 10 (SEQ ID NOS: 1 to 3522), or a subsequence, portion, homologue, variant or derivative thereof into the viral vector, along with another gene which encodes the ligand for a receptor on a specific target cell, for example, such that the vector is now target specific. Viral vectors can be made target specific by attaching, for example, a sugar, a glycolipid, or a protein. Targeting can also be accomplished by using an antibody to target the viral vector. Those of skill in the art will know of, or can readily ascertain without undue experimentation, specific polynucleotide sequences which can be inserted into the viral genome or attached to a viral envelope to allow target specific delivery of the viral vector containing the gene.

[0131] Since recombinant viruses are defective, they require assistance in order to produce infectious vector particles. This assistance can be provided, for example, by using helper cell lines that contain plasmids encoding all of the structural genes of the virus under the control of regulatory sequences within the viral genome. These plasmids are missing a nucleotide sequence which enables the packaging mechanism to recognize a polynucleotide transcript for encapsidation. These cell lines produce empty virions, since no genome is packaged. If a viral vector is introduced into such cells in which the packaging signal is intact, but the structural genes are replaced by other genes of interest, the vector can be packaged and vector virion produced.

[0132] Viral or non-viral approaches may also be employed for the introduction of one or more therapeutic polynucleotides that express the one or more peptides or proteins, comprising, consisting of, or consisting essentially of an amino acid sequence selected from those sequences set forth in Tables 1 to 10 (SEQ ID NOS: 1 to 3522), or a subsequence, portion, homologue, variant or derivative thereof, into polynucleotide-encoding polynucleotide into antigen presenting cells. The polynucleotides may be DNA, RNA, mRNA that directly encode the one or more peptides or proteins of the present disclosure, or may be introduced as part of an expression vector.

[0133] Another example of an immunization includes colloidal dispersion systems that include macromolecule complexes, nanocapsules, microspheres, beads, and lipid-based systems including oil-in-water emulsions, micelles, mixed micelles, and liposomes and the one or more polynucleotides that express the one or more peptides or proteins, comprising, consisting of, or consisting essentially of an amino acid sequence selected from those sequences set forth in Tables 1 to 10 (SEQ ID NOS: 1 to 3522), or a subsequence, portion, homologue, variant or derivative thereof. One non-limiting example of a colloidal system for use with the present disclosure is a liposome. Liposomes are artificial membrane vesicles which are useful as delivery vehicles in vitro and in vivo. It has been shown that large unilamellar vesicles (LUV), which range in size from 0.2-4.0 micrometers that can encapsulate a substantial percentage of an aqueous buffer containing large macromolecules. RNA, DNA and intact virions can be encapsulated within the aqueous interior and be delivered to cells in a biologically active form (Fraley, et al., Trends Biochem. Sci., 6:77, 1981). In addition to mammalian cells, liposomes have been used for delivery of polynucleotides in plant, yeast and bacterial cells. In order for a liposome to be an efficient gene transfer vehicle, the following characteristics should be present: (Zakut and Givol, supra) encapsulation of the genes of interest at high efficiency while not compromising their biological activity; (Fearnhead, et al., supra) preferential and substantial binding to a target cell in comparison to non-target cells; (Korsmeyer, S. J., supra) delivery of the aqueous contents of the vesicle to the target cell cytoplasm at high efficiency; and (Kinoshita, et al., supra) accurate and effective expression of genetic information (Mannino, et al., Bio Techniques, 6:682, 1988).

[0134] The composition for immunizing the subject or patient may, in certain embodiments comprise a combination of phospholipid, particularly high-phase-transition-temperature phospholipids, usually in combination with steroids, especially cholesterol. Other phospholipids or other lipids may also be used. The physical characteristics of liposomes depend on pH, ionic strength, and the presence of divalent cations. The targeting of liposomes can be classified based on anatomical and mechanistic factors. Anatomical classification is based on the level of selectivity, for example, organ-specific, cell-specific, and organelle-specific. Mechanistic targeting can be distinguished based upon whether it is passive or active. Passive targeting utilizes the natural tendency of liposomes to distribute to cells of the reticuloendothelial system (RES) in organs which contain sinusoidal capillaries. Active targeting, on the other hand, involves alteration of the liposome by coupling the liposome to a specific ligand such as a monoclonal antibody, sugar, glycolipid, or protein, or by changing the composition or size of the liposome in order to achieve targeting to organs and cell types other than the naturally occurring sites of localization, specifically, cells that can become infected with a coronavirus or interact with the proteins, peptides, and/or gene products of a coronavirus, e.g., immune cells.

[0135] For any of the above approaches, the immune modulating polynucleotide construct, composition, or formulation is preferably applied to a site that will enhance the immune response. For example, the immunization may be intramuscular, intraperitoneal, enteral, parenteral, intranasal, intrapulmonary, or subcutaneous. In the gene delivery constructs of the instant disclosure, polynucleotide expression is directed from any suitable promoter (e.g., the human cytomegalovirus, simian virus 40, actin or adenovirus constitutive promoters; or the cytokine or metalloprotease promoters for activated synoviocyte specific expression).

[0136] In one example of the immune modifying peptide(s) or protein(s) include polynucleotides, constructs and/or mRNAs that express the one or more polynucleotides that express the one or more peptides or proteins, comprising, consisting of, or consisting essentially of an amino acid sequence selected from those sequences set Tables 1 to 10, or a subsequence, portion, homologue, variant or derivative thereof, that are designed to improve one or more of the stability and/or clearance in tissues, uptake and/or kinetics, cellular access by the peptide(s) or protein(s), translational, mRNA half-life, translation efficiency, immune evasion, protein production capacity, accessibility to circulation, peptide(s) or protein(s) half-life and/or presentation in the context of MHC on antigen presenting cells.

[0137] The present disclosure contemplates immunization for use in both active and passive immunization embodiments. Immunogenic compositions, proposed to be suitable for use as a vaccine, may be prepared most readily directly from immunogenic peptides, proteins, monomers, multimers and/or peptide-MHC complexes prepared in a manner disclosed herein. The antigenic material is generally processed to remove undesired contaminants, such as, small molecular weight molecules, incomplete proteins, or when manufactured in plant cells, plant components such as cell walls, plant proteins, and the like. Often, these immunizations are lyophilized for ease of transport and/or to increase shelf-life and can then be more readily dissolved in a desired vehicle, such as saline.

[0138] The preparation of immunizations (also referred to as vaccines) that contain the immunogenic proteins of the present disclosure as active ingredients is generally well understood in the art, as exemplified by U.S. Pat. Nos. 4,608,251; 4,601,903; 4,599,231; 4,599,230; 4,596,792; and 4,578,770, all incorporated herein by reference. Typically, such immunizations are prepared as injectables. The immunizations can be a liquid solution or suspension but may also be provided in a solid form suitable for solution in, or suspension in, liquid prior to injection may also be prepared. The preparation may also be emulsified. The active immunogenic ingredient is often mixed with excipients that are pharmaceutically acceptable and compatible with the active ingredient. Suitable excipients are, for example, water, saline, dextrose, glycerol, ethanol, buffers, or the like and combinations thereof. In addition, if desired, the immunization may contain minor amounts of auxiliary substances such as wetting or emulsifying agents, pH buffering agents, or adjuvants which enhance the effectiveness of the vaccines.

[0139] The immunization is/are administered in a manner compatible with the dosage formulation, and in such amount as will be therapeutically effective and immunogenic. The quantity to be administered depends on the subject to be treated, including, e.g., the capacity of the individual's immune system to synthesize antibodies, and the degree of protection desired. Precise amounts of active ingredient required to be administered depend on the judgment of the practitioner. However, suitable dosage ranges are of the order of several hundred micrograms active ingredient per vaccination. Suitable regimes for initial administration and booster shots are also variable but are typified by an initial administration followed by subsequent inoculations or other administrations.

[0140] The manner of application of the immunization may be varied widely. Any of the conventional methods for administration of a vaccine are applicable. These are believed to also include oral application on a solid physiologically acceptable base or in a physiologically acceptable dispersion, parenterally, by injection or the like. The dosage of the vaccine will depend on the route of administration and will vary according to the size of the host.

[0141] Various methods of achieving adjuvant effect for the vaccine includes use of agents such as aluminum hydroxide or phosphate (alum), commonly used as 0.05 to 0.1 percent solution in phosphate buffered saline, admixture with synthetic polymers of sugars (Carbopol) used as 0.25 percent solution, aggregation of the protein in the vaccine by heat treatment with temperatures ranging between 700 to 101° C. for 30 second to 2-minute periods respectively. Aggregation by reactivating with pepsin treated (Fab) antibodies to albumin, mixture with bacterial cells such as C. parvum or endotoxins or lipopolysaccharide components of gram-negative bacteria, emulsion in physiologically acceptable oil vehicles such as mannide mono-oleate (Aracel A) or emulsion with 20 percent solution of a perfluorocarbon (Fluosol-DA) used as a block substitute may also be employed.

[0142] In many instances, it will be desirable to have multiple administrations of the vaccine, usually not exceeding six to ten immunizations, more usually not exceeding four immunizations and preferably one or more, usually at least about three immunizations. The immunizations will normally be at from two to twelve-week intervals, more usually from three to five-week intervals. Periodic boosters at intervals of 1-5 years, usually three years, will be desirable to maintain protective levels of the antibodies. The course of the immunization may be followed by assays for antibodies for the supernatant antigens. The assays may be performed by labeling with conventional labels, such as radionuclides, enzymes, fluorescent agents, and the like. These techniques are well known and may be found in a wide variety of patents, such as Hudson and Cranage, Vaccine Protocols, 2003 Humana Press, relevant portions incorporated herein by reference.

[0143] Techniques and compositions for making useful dosage forms using the present disclosure are described in one or more of the following references: Anderson, Philip O.; Knoben, James E.; Troutman, William G, eds., Handbook of Clinical Drug Data, Tenth Edition, McGraw-Hill, 2002; Pratt and Taylor, eds., Principles of Drug Action, Third Edition, Churchill Livingston, New York, 1990; Katzung, ed., Basic and Clinical Pharmacology, Ninth Edition, McGraw Hill, 2007; Goodman and Gilman, eds., The Pharmacological Basis of Therapeutics, Tenth Edition, McGraw Hill, 2001; Remington's Pharmaceutical Sciences, 20th Ed., Lippincott Williams & Wilkins., 2000, and updates thereto; Martindale, The Extra Pharmacopoeia, Thirty-Second Edition (The Pharmaceutical Press, London, 1999); all of which are incorporated by reference, and the like, relevant portions incorporated herein by reference.

[0144] Many suitable expression systems are commercially available, including, for example, the following: baculovirus expression (Reilly, P. R., et al., BACULOVIRUS EXPRESSION VECTORS: A LABORATORY MANUAL (1992); Beames, et al., Biotechniques 11:378 (1991); Pharmingen; Clontech, Palo Alto, Calif)), vaccinia expression systems (Earl, P. L., et al., “Expression of proteins in mammalian cells using vaccinia” In Current Protocols in Molecular Biology (F. M. Ausubel, et al. Eds.), Greene Publishing Associates & Wiley Interscience, New York (1991); Moss, B., et al., U.S. Pat. No. 5,135,855, issued Aug. 4, 1992), expression in bacteria (Ausubel, F. M., et al., CURRENT PROTOCOLS IN MOLECULAR BIOLOGY, John Wiley and Sons, Inc., Media Pa.; Clontech), expression in yeast (Rosenberg, S. and Tekamp-Olson, P., U.S. Pat. No. RE35,749, issued, Mar. 17, 1998, herein incorporated by reference; Shuster, J. R., U.S. Pat. No. 5,629,203, issued May 13, 1997, herein incorporated by reference; Gellissen, G., et al., Antonie Van Leeuwenhoek, 62(1-2):79-93 (1992); Romanos, M. A., et al., Yeast 8(6):423-488 (1992); Goeddel, D. V., Methods in Enzymology 185 (1990); Guthrie, C., and G. R. Fink, Methods in Enzymology 194 (1991)), expression in mammalian cells (Clontech; Gibco-BRL, Ground Island, N.Y.; e.g., Chinese hamster ovary (CHO) cell lines (Haynes, J., et al., Nuc. Acid. Res. 11:687-706 (1983); 1983, Lau, Y. F., et al., Mol. Cell. Biol. 4:1469-1475 (1984); Kaufman, R. J., “Selection and coamplification of heterologous genes in mammalian cells,” in Methods in Enzymology, vol. 185, pp 537-566. Academic Press, Inc., San Diego Calif. (1991)), and expression in plant cells (plant cloning vectors, Clontech Laboratories, Inc., Palo-Alto, Calif, and Pharmacia LKB Biotechnology, Inc., Pistcataway, N.J.; Hood, E., et al., J. Bacteriol. 168:1291-1301 (1986); Nagel, R., et al., FEMS Microbiol. Lett. 67:325 (1990); An, et al., “Binary Vectors”, and others in Plant Molecular Biology Manual A3:1-19 (1988); Miki, B. L. A., et al., pp. 249-265, and others in Plant DNA Infectious Agents (Hohn, T., et al., eds.) Springer-Verlag, Wien, Austria, (1987); Plant Molecular Biology: Essential Techniques, P. G. Jones and J. M. Sutton, New York, J. Wiley, 1997; Miglani, Gurbachan Dictionary of Plant Genetics and Molecular Biology, New York, Food Products Press, 1998; Henry, R. J., Practical Applications of Plant Molecular Biology, New York, Chapman & Hall, 1997), relevant portion incorporated herein by reference.

[0145] As used herein, the term “effective amount” or “effective dose” refers to that amount of the peptide or protein T cell epitopes of the disclosure sufficient to induce immunity, to prevent and/or ameliorate an infection or to reduce at least one symptom of an infection and/or to enhance the efficacy of another dose of peptide or protein T cell epitopes. An effective dose may refer to the amount of peptide or protein T cell epitopes sufficient to delay or minimize the onset of an infection. An effective dose may also refer to the amount of peptide or protein T cell epitopes that provides a therapeutic benefit in the treatment or management of an infection. Further, an effective dose is the amount with respect to peptide or protein T cell epitopes of the disclosure alone, or in combination with other therapies, that provides a therapeutic benefit in the treatment or management of an infection. An effective dose may also be the amount sufficient to enhance a subject's (e.g., a human's) own immune response against a subsequent exposure to an infectious agent. Levels of immunity can be monitored, e.g., by measuring amounts of neutralizing secretory and/or serum antibodies, e.g., by plaque neutralization, complement fixation, enzyme-linked immunosorbent, or microneutralization assay. In the case of a vaccine, an “effective dose” is one that prevents disease and/or reduces the severity of symptoms. A “reduction” of a symptom or symptoms (and grammatical equivalents of this phrase) means decreasing of the severity or frequency of the symptom(s), or elimination of the symptom(s). A “prophylactically effective amount” of a drug is an amount of a drug that, when administered to a subject, will have the intended prophylactic effect, e.g., preventing or delaying the onset (or reoccurrence) of an injury, disease, pathology or condition, or reducing the likelihood of the onset (or reoccurrence) of an injury, disease, pathology, or condition, or their symptoms, in this case, an infectious disease, and more particularly, a coronavirus infection. The full prophylactic effect does not necessarily occur by administration of one dose, and may occur only after administration of a series of doses. Thus, a prophylactically effective amount may be administered in one or more administrations. Guidance can be found in the literature for appropriate dosages for given classes of pharmaceutical products. For example, for the given parameter, an effective amount will show an increase or decrease of at least 5%, 10%, 15%, 20%, 25%, 40%, 50%, 60%, 75%, 80%, 90%, or at least 100%. Efficacy can also be expressed as “-fold” increase or decrease. For example, a therapeutically effective amount can have at least a 1.2-fold, 1.5-fold, 2-fold, 5-fold, or more effect over a control. The exact amounts will depend on the purpose of the treatment, and will be ascertainable by one skilled in the art using known techniques (see, e.g., Lieberman, Pharmaceutical Dosage Forms (vols. 1-3, 1992); Lloyd, The Art, Science and Technology of Pharmaceutical Compounding (1999); Pickar, Dosage Calculations (1999); and Remington: The Science and Practice of Pharmacy, 20th Edition, 2003, Gennaro, Ed., Lippincott, Williams & Wilkins), relevant portions incorporated herein by reference.

[0146] As used herein, the term “immune stimulator” refers to a compound that enhances an immune response via the body's own chemical messengers (cytokines). These molecules comprise various cytokines, lymphokines and chemokines with immunostimulatory, immunopotentiating, and pro-inflammatory activities, such as interferons, interleukins (e.g., IL-1, IL-2, IL-3, IL-4, IL-12, IL-13); growth factors (e.g., granulocyte-macrophage (GM)-colony stimulating factor (CSF)); and other immunostimulatory molecules, such as macrophage inflammatory factor, Flt3 ligand, B7.1; B7.2, etc. The immune stimulator molecules can be administered in the same formulation as peptide or protein T cell epitopes of the disclosure, or can be administered separately. Either the protein or an expression vector encoding the protein can be administered to produce an immunostimulatory effect.

[0147] As used herein, in certain embodiments, the term “protective immune response” or “protective response” refers to an immune response mediated by antibodies against an infectious agent, which is exhibited by a vertebrate (e.g., a human), which prevents or ameliorates an infection or reduces at least one symptom thereof. Peptide and protein T cell epitopes of the disclosure can stimulate the production of antibodies that, for example, neutralize infectious agents, blocks infectious agents from entering cells, blocks replication of said infectious agents, and/or protect host cells from infection and destruction. In other embodiments, the term can also refer to an immune response that is mediated by T-lymphocytes and/or other white blood cells against an infectious agent, exhibited by a vertebrate (e.g., a human), that prevents or ameliorates flavivirus infection or reduces at least one symptom thereof. Peptide and protein T cell epitopes of the disclosure can stimulate the T cell responses that, for example, neutralize infectious agents, kill virus infected cells, blocks infectious agents from entering cells, blocks replication of said infectious agents, and/or protect host cells from infection and destruction.

[0148] As used herein, the terms “biological sample” or “sample” refer to materials obtained from or derived from a subject or patient. A biological sample includes sections of tissues such as biopsy and autopsy samples, and frozen sections taken for histological purposes. Such samples include bodily fluids such as blood and blood fractions or products (e.g., serum, plasma, platelets, red blood cells, and the like), sputum, tissue, cultured cells (e.g., primary cultures, explants, and transformed cells) stool, urine, synovial fluid, joint tissue, synovial tissue, synoviocytes, fibroblast-like synoviocytes, macrophage-like synoviocytes, immune cells, hematopoietic cells, fibroblasts, macrophages, T cells, etc. A biological sample is typically obtained from a eukaryotic organism, such as a mammal such as a primate e.g., chimpanzee or human; cow; dog; cat; a rodent, e.g., guinea pig, rat, mouse; rabbit; or a bird; reptile; or fish.

[0149] As used herein, the terms “virus” or “virus particle” are used according to their plain ordinary meaning within Virology and refers to a virion including the viral genome (e.g., DNA, RNA, single strand, double strand), viral capsid and associated proteins, and in the case of enveloped viruses (e.g., herpesvirus), an envelope including lipids and optionally components of host cell membranes, and/or viral proteins. In embodiments, the virus is a coronavirus. Non-limiting examples of coronaviruses (CoV) from which T cell epitopes can be identified include, e.g., SARS-CoV (SARS-CoV-1), MERS-CoV, and SARS-CoV-2, but also betacoronaviruses, e.g., HCoV-OC43, HCoVHKU1, HCoV-229E and alphacoronaviuses such as HCoV-NL63, and/or other coronaviruses endemic in humans. The viral genome of coronaviruses encodes at least the following structure proteins, the spike (S), envelope (E), membrane (M), and nucleocapsid (N) proteins. The S glycoprotein is responsible for binding the host receptor via the receptor-binding domain (RBD) in its S1 subunit, as well as the subsequent membrane fusion and viral entry driven by its S2 subunit. Gene sequencing of SARS-CoV-2 showed that this novel coronavirus, a betacoronavirus, is related to the MERS-CoV and the SARS-CoV. SARS-CoV, MERS-CoV, and SARS-CoV-2 belong to the betacoronavirus genus and are highly pathogenic zoonotic viruses. Thus, the present disclosure can be used not only to determine antigenic peptides from the three highly pathogenic betacoronaviruses, but also low-pathogenicity betacoronaviruses, such as, HCoV-OC43, HCoVHKU1, HCoV-NL63 and HCoV-229E, are also endemic in humans. In certain specific embodiments, the coronavirus is SARS-CoV-2, including novel mutants of SARS-CoV-2 that include mutants from five clades (19A, 19B, 20A, 20B, and 20C) according to Nextstrain, in GISAID nomenclature which divides them into seven clades (L, O, V, S, G, GH, and GR), and/or PANGOLIN nomenclature which divides them into six major lineages (A, B, B.1, B.1.1, B.1.177, B.1.1.7). Notable mutations of SARS-CoV-2 include, e.g., D614G, P681H, N501Y, 69-70del, P681H, Y453F, 69-70deltaHV, N501Y, K417N, E484K, N501Y, and E484K.

[0150] As used herein, a “cell” refers to a cell carrying out metabolic or other function sufficient to preserve or replicate its genomic DNA. A cell can be identified by well-known methods in the art including, for example, presence of an intact membrane, staining by a particular dye, ability to produce progeny or, in the case of a gamete, ability to combine with a second gamete to produce a viable offspring. Cells may include prokaryotic and eukaryotic cells. Prokaryotic cells include but are not limited to bacteria. Eukaryotic cells include but are not limited to yeast cells and cells derived from plants and animals, for example mammalian, insect (e.g., spodoptera) and human cells. Cells may be useful when they are naturally nonadherent or have been treated not to adhere to surfaces, for example by trypsinization.

[0151] As used herein, the term “contacting” is used in accordance with its plain ordinary meaning and refers to the process of allowing at least two distinct species to become sufficiently proximal to react, interact or physically touch. It should be appreciated; however, the resulting reaction product can be produced directly from a reaction between the added reagents or from an intermediate from one or more of the added reagents which can be produced in the reaction mixture. The term “contacting” may include allowing two species to react, interact, or physically touch, wherein the two species may be, for example, an amino acid sequence, protein, or peptide as provided herein and an immune cell, such as a T cell.

[0152] As used herein, a “control” sample or value refers to a sample that serves as a reference, usually a known reference, for comparison to a test sample. For example, a test sample can be taken from a test condition, e.g., in the presence of a test compound, and compared to samples from known conditions, e.g., in the absence of the test compound (negative control), or in the presence of a known compound (positive control). A control can also represent an average value gathered from a number of tests or results. One of skill in the art will recognize that controls can be designed for assessment of any number of parameters. For example, a control can be devised to compare therapeutic benefit based on pharmacological data (e.g., half-life) or therapeutic measures (e.g., comparison of side effects). One of skill in the art will understand which controls are valuable in a given situation and be able to analyze data based on comparisons to control values. Controls are also valuable for determining the significance of data. For example, if values for a given parameter are widely variant in controls, variation in test samples will not be considered as significant.

[0153] As used herein, the term “modulator” refers to a composition that increases or decreases the level of a target molecule or the function of a target molecule or the physical state of the target of the molecule relative to the absence of the modulator.

[0154] As used herein, the term “modulate” is used in accordance with its plain ordinary meaning and refers to the act of changing or varying one or more properties. “Modulation” refers to the process of changing or varying one or more properties. For example, as applied to the effects of a modulator on a target protein, to modulate means to change by increasing or decreasing a property or function of the target molecule or the amount of the target molecule.

[0155] As used herein, the terms “associated” or “associated with” in the context of a substance or substance activity or function associated with a disease (e.g. a protein associated disease, a cancer (e.g., cancer, inflammatory disease, autoimmune disease, or infectious disease)) means that the disease (e.g. cancer, inflammatory disease, autoimmune disease, or infectious disease) is caused by (in whole or in part), or a symptom of the disease is caused by (in whole or in part) the substance or substance activity or function. As used herein, what is described as being associated with a disease, if a causative agent, could be a target for treatment of the disease.

[0156] As used herein, the term “aberrant” as used herein refers to different from normal. When used to describe enzymatic activity or protein function, aberrant refers to activity or function that is greater or less than a normal control or the average of normal non-diseased control samples. Aberrant activity may refer to an amount of activity that results in a disease, wherein returning the aberrant activity to a normal or non-disease-associated amount (e.g., by administering a compound or using a method as described herein), results in reduction of the disease or one or more disease symptoms.

[0157] As used herein, the terms “subject” or “subject in need thereof” refer to a living organism who is at risk of or prone to having a disease or condition, or who is suffering from a disease or condition that can be treated by administration of a composition or pharmaceutical composition as provided herein. Non-limiting examples include humans and other primates, but also includes non-human primates such as chimpanzees and other apes and monkey species; farm animals such as cattle, sheep, pigs, goats and horses; domestic mammals such as dogs and cats; laboratory animals including rodents such as mice, rats and guinea pigs; birds, including domestic, wild and game birds such as chickens, turkeys and other gallinaceous birds, ducks, geese, and the like. The term does not denote a particular age. Thus, both adult and newborn individuals are intended to be covered. The system described above is intended for use in any of the above vertebrate species, since the immune systems of all of these vertebrates operate similarly.

[0158] As used herein, the terms “disease” or “condition” refer to a state of being or health status of a patient or subject capable of being treated with a compound, pharmaceutical composition, or method provided herein. In embodiments, a patient or subject is human. In embodiments, the disease is coronavirus infection. In certain alternative embodiments, the disease is SARS-CoV-2 infection. In still other embodiments, the disease is COVID-19.

[0159] As used herein, “treatment” or “treating,” or “palliating” or “ameliorating” are used interchangeably herein. These terms refer to an approach for obtaining beneficial or desired results including but not limited to therapeutic benefit and/or a prophylactic benefit. By therapeutic benefit is meant eradication or amelioration of the underlying disorder being treated or the disorder resulting from viral infection. Also, a therapeutic benefit is achieved with the eradication or amelioration of one or more of the physiological symptoms associated with viral infection or the underlying disorder such that an improvement is observed in the patient, notwithstanding that the patient may still be afflicted with the underlying disorder or may still be infected. For prophylactic benefit, the compositions may be administered to a patient at risk of viral infection, of developing a particular disease, or to a patient reporting one or more of the physiological symptoms of a disease, even though a diagnosis of this disease may not have been made. Treatment includes preventing the infection or disease, that is, causing the clinical symptoms of the disease not to develop by administration of a protective composition prior to infection or the induction of the disease; suppressing the disease, that is, causing the clinical symptoms of the disease or infection not to develop by administration of a protective composition after the inductive event or infection but prior to the clinical appearance or reappearance of the disease; inhibiting the disease, that is, arresting the development of clinical symptoms by administration of a protective composition after their initial appearance; preventing re-occurring of the disease and/or relieving the disease, that is, causing the regression of clinical symptoms by administration of a protective composition after their initial appearance. “Treatment” can also refer to any of (i) the prevention of infection or reinfection, as in a traditional vaccine, (ii) the reduction or elimination of symptoms, and (iii) the substantial or complete elimination of the pathogen in question. Treatment may be affected prophylactically (prior to infection) or therapeutically (following infection).

[0160] In addition, in certain embodiments, “treatment,” “treat,” or “treating” refers to a method of reducing the effects of one or more symptoms of infection with a coronavirus. Thus, in the disclosed method, treatment can refer to a 10%, 20%, 30%, 40%, 50%, 60%, 70%, 80%, 90%, or 100% reduction in the severity of an established infection, disease, condition, or symptom of the infection, disease or condition. For example, a method for treating a disease is considered to be a treatment if there is a 10% reduction in one or more symptoms of the disease in a subject as compared to a control. Thus, the reduction can be a 10%, 20%, 30%, 40%, 50%, 60%, 70%, 80%, 90%, 100%, or any percent reduction in between 10% and 100% as compared to native or control levels. It is understood that treatment does not necessarily refer to a cure or complete ablation of the disease, condition, or symptoms of the disease or condition and/or complete prevention of infection. Further, as used herein, references to decreasing, reducing, or inhibiting include a change of 10%, 20%, 30%, 40%, 50%, 60%, 70%, 80%, 90% or greater as compared to a control level and such terms can include but do not necessarily include complete elimination.

[0161] As used herein the terms “diagnose” or “diagnosing” refers to the recognition of an infection, disease or condition by signs and symptoms. Diagnosing can refer to the determination of whether a subject has an infection or disease. Diagnosis may refer to the determination of the type of disease or condition a subject has or the type of virus the subject is infected with.

[0162] Diagnostic agents provided herein include any such agent, which are well-known in the relevant art. Among imaging agents are fluorescent and luminescent substances, including, but not limited to, a variety of organic or inorganic small molecules commonly referred to as “dyes,” “labels,” or “indicators.” Examples include fluorescein, rhodamine, acridine dyes, Alexa dyes, and cyanine dyes. Enzymes that may be used as imaging agents in accordance with the embodiments of the disclosure include, but are not limited to, horseradish peroxidase, alkaline phosphatase, acid phosphatase, glucose oxidase, β-galactosidase, β-glucoronidase or β-lactamase. Such enzymes may be used in combination with a chromogen, a fluorogenic compound or a luminogenic compound to generate a detectable signal.

[0163] The peptide(s) or protein(s) of the present disclosure can also be used in binding assays including, but are not limited to, immunoassays such as competitive and non-competitive assay systems using techniques such as western blots, radioimmunoassays, ELISA (enzyme linked immunosorbent assay), “sandwich” immunoassays, Meso Scale Discovery (MSD, Gaithersburg, Md.), immunoprecipitation assays, ELISPOT, precipitin reactions, gel diffusion precipitin reactions, immunodiffusion assays, agglutination assays, complement-fixation assays, immunoradiometric assays, fluorescent immunoassays, and protein A immunoassays. Such assays are routine and well known in the art (see, e.g., Ausubel et al., eds, 1994, Current Protocols in Molecular Biology, Vol. 1, John Wiley & Sons, Inc., New York, relevant portions incorporated herein by reference).

[0164] Radioactive substances that may be used as imaging agents in accordance with the embodiments of the disclosure include, but are not limited to, ¹⁸F, ³²P, ³³P, ⁴⁵Ti, ⁴⁷Sc, ⁵²Fe, ⁵⁹Fe, ⁶²Cu, ⁶⁴Cu, ⁶⁷Cu, ⁶⁷Ga, ⁶⁸Ga, ⁷⁷As, ⁸⁶Y, ⁹⁰Y, ⁸⁹Sr, ⁸⁹Zr, ⁹⁴Tc, ⁹⁴Tc, ^{99m}Tc, ⁹⁹Mo, ¹⁰⁵Pd, ¹⁰⁵Rh, ¹¹¹Ag, ¹¹¹In, ¹²³I, ¹²⁴I, ¹²⁵I, ¹³¹I, ¹⁴²Pr, ¹⁴³Pr, ¹⁴⁹Pm, ¹⁵³Sm, ¹⁵⁴⁻¹⁵⁸¹Gd, ¹⁶¹Tb, ¹⁶⁶Dy, ¹⁶⁶Ho, ¹⁶⁹Er, ¹⁷⁵Lu, ¹⁷⁷Lu, ¹⁸⁶Re, ¹⁸⁸Re, ¹⁸⁹Re, ¹⁹⁴Ir, ¹⁹⁸Au, ¹⁹⁹Au, ²¹¹At, ²¹¹Pb, ²¹²Bi, ²¹²Pb, ²¹³Bi, ²²³Ra and ²²⁵Ac. Paramagnetic ions that may be used as additional imaging agents in accordance with the embodiments of the disclosure include, but are not limited to, ions of transition and lanthanide metals (e.g., metals having atomic numbers of 21-29, 42, 43, 44, or 57-71). These metals include ions of Cr, V, Mn, Fe, Co, Ni, Cu, La, Ce, Pr, Nd, Pm, Sm, Eu, Gd, Tb, Dy, Ho, Er, Tm, Yb and Lu.

[0165] When the imaging agent is a radioactive metal or paramagnetic ion, the agent may be reacted with another long-tailed reagent having a long tail with one or more chelating groups attached to the long tail for binding to these ions. The long tail may be a polymer such as a polylysine, polysaccharide, or other derivatized or derivatizable chain having pendant groups to which the metals or ions may be added for binding. Examples of chelating groups that may be used according to the disclosure include, but are not limited to, ethylenediaminetetraacetic acid (EDTA), diethylenetriaminepentaacetic acid (DTPA), DOTA, NOTA, NETA, TETA, porphyrins, polyamines, crown ethers, bis-thiosemicarbazones, polyoximes, and like groups.

[0166] As used herein, the terms “dose” and “dosage” are used interchangeably herein. A dose refers to the amount of active ingredient given to an individual at each administration. The dose will vary depending on a number of factors, including the range of normal doses for a given therapy, frequency of administration; size and tolerance of the individual; severity of the condition; risk of side effects; and the route of administration. One of skill will recognize that the dose can be modified depending on the above factors or based on therapeutic progress. The term “dosage form” refers to the particular format of the pharmaceutical or pharmaceutical composition, and depends on the route of administration. For example, a dosage form can be in a liquid form for nebulization, e.g., for inhalants, in a tablet or liquid, e.g., for oral delivery, or a saline solution, e.g., for injection.

[0167] As used herein, the term “administering” means oral administration, administration as a suppository, topical contact, intravenous, intraperitoneal, intramuscular, intralesional, intrathecal, intranasal or subcutaneous administration, or the implantation of a slow-release device, e.g., a mini-osmotic pump, to a subject. Administration is by any route, including parenteral and transmucosal (e.g., buccal, sublingual, palatal, gingival, nasal, vaginal, rectal, or transdermal). Parenteral administration includes, e.g., intravenous, intramuscular, intra-arteriole, intradermal, subcutaneous, intraperitoneal, intraventricular, and intracranial. Other modes of delivery include, but are not limited to, the use of liposomal formulations, intravenous infusion, transdermal patches, etc. By “co-administer” it is meant that a composition described herein is administered at the same time, just prior to, or just after the administration of one or more additional therapies, for example cancer therapies such as chemotherapy, hormonal therapy, radiotherapy, or immunotherapy. The compounds of the disclosure can be administered alone or can be co-administered to the patient. Co-administration is meant to include simultaneous or sequential administration of the compounds individually or in combination (more than one compound). Thus, the preparations can also be combined, when desired, with other active substances (e.g., to reduce metabolic degradation). The compositions of the present disclosure can be delivered by transdermally, by a topical route, formulated as applicator sticks, solutions, suspensions, emulsions, gels, creams, ointments, pastes, jellies, paints, powders, and aerosols.

[0168] Formulations suitable for oral administration can consist of (a) liquid solutions, such as an effective amount of the antibodies provided herein suspended in diluents, such as water, saline or PEG 400; (b) capsules, sachets or tablets, each containing a predetermined amount of the active ingredient, as liquids, solids, granules or gelatin; (c) suspensions in an appropriate liquid; and (d) suitable emulsions. Tablet forms can include one or more of lactose, sucrose, mannitol, sorbitol, calcium phosphates, corn starch, potato starch, microcrystalline cellulose, gelatin, colloidal silicon dioxide, talc, magnesium stearate, stearic acid, and other excipients, colorants, fillers, binders, diluents, buffering agents, moistening agents, preservatives, flavoring agents, dyes, disintegrating agents, and pharmaceutically compatible carriers. Lozenge forms can comprise the active ingredient in a flavor, e.g., sucrose, as well as pastilles comprising the active ingredient in an inert base, such as gelatin and glycerin or sucrose and acacia emulsions, gels, and the like containing, in addition to the active ingredient, carriers known in the art.

[0169] Pharmaceutical compositions can also include large, slowly metabolized macromolecules such as proteins, polysaccharides such as chitosan, polylactic acids, polyglycolic acids and copolymers (such as latex functionalized Sepharose™, agarose, cellulose, and the like), polymeric amino acids, amino acid copolymers, and lipid aggregates (such as oil droplets or liposomes). Additionally, these carriers can function as immunostimulating agents (i.e., adjuvants).

[0170] As used herein, the term “adjuvant” refers to a compound that when administered in conjunction with the compositions provided herein including embodiments thereof, augments the composition's immune response. Generally, adjuvants are non-toxic, have high-purity, are degradable, and are stable. Adjuvants can augment an immune response by several mechanisms including lymphocyte recruitment, stimulation of B and/or T cells, and stimulation of macrophages. The adjuvant increases the titer of induced antibodies and/or the binding affinity of induced antibodies relative to the situation if the immunogen were used alone. A variety of adjuvants can be used in combination with the agents provided herein including embodiments thereof, to elicit an immune response. Preferred adjuvants augment the intrinsic response to an immunogen without causing conformational changes in the immunogen that affect the qualitative form of the response. Preferred adjuvants include aluminum hydroxide and aluminum phosphate, 3 De-O-acylated monophosphoryl lipid A (MPL™) (see GB 2220211 (RIBI ImmunoChem Research Inc., Hamilton, Montana, now part of Corixa). Stimulon™ QS-21 is a triterpene glycoside or saponin isolated from the bark of the Quillaja Saponaria Molina tree found in South America (see Kensil et al., in Vaccine Design: The Subunit andAdjuvant Approach (eds. Powell & Newman, Plenum Press, NY, 1995); U.S. Pat. No. 5,057,540), (Aquila BioPharmaceuticals, Framingham, MA). Other adjuvants are oil in water emulsions (such as squalene or peanut oil), optionally in combination with immune stimulants, such as monophosphoryl lipid A (see Stoute et al., N. Engl. J. Med. 336, 86-91 (1997)), pluronic polymers, and killed mycobacteria. Another adjuvant is CpG (WO 98/40100). Adjuvants can be administered as a component of a therapeutic composition with an active agent or can be administered separately, before, concurrently with, or after administration of the therapeutic agent. Other adjuvants contemplated for the disclosure are saponin adjuvants, such as Stimulon™ (QS-21, Aquila, Framingham, MA) or particles generated therefrom such as ISCOMs (immunostimulating complexes) and ISCOMATRIX. Other adjuvants include RC-529, GM-CSF and Complete Freund's Adjuvant (CFA) and Incomplete Freund's Adjuvant (IFA). Other adjuvants include cytokines, such as interleukins (e.g., IL-1 α and β peptides, IL-2, IL-4, IL-6, IL-12, IL-13, and IL-15), macrophage colony stimulating factor (M-CSF), granulocyte-macrophage colony stimulating factor (GM-CSF), tumor necrosis factor (TNF), chemokines, such as MIP1α and β and RANTES. Another class of adjuvants is glycolipid analogues including N-glycosylamides, N-glycosylureas and N-glycosylcarbamates, each of which is substituted in the sugar residue by an amino acid, as immuno-modulators or adjuvants (see U.S. Pat. No. 4,855,283). Heat shock proteins, e.g., HSP70 and HSP90, may also be used as adjuvants.

[0171] Suitable formulations for rectal administration include, for example, suppositories, which consist of the packaged nucleic acid with a suppository base. Suitable suppository bases include natural or synthetic triglycerides or paraffin hydrocarbons. In addition, it is also possible to use gelatin rectal capsules which consist of a combination of the compound of choice with a base, including, for example, liquid triglycerides, polyethylene glycols, and paraffin hydrocarbons.

[0172] Formulations suitable for parenteral administration, such as, for example, by intraarticular (in the joints), intravenous, intramuscular, intratumoral, intradermal, intraperitoneal, and subcutaneous routes, include aqueous and non-aqueous, isotonic sterile injection solutions, which can contain antioxidants, buffers, bacteriostats, and solutes that render the formulation isotonic with the blood of the intended recipient, and aqueous and non-aqueous sterile suspensions that can include suspending agents, solubilizers, thickening agents, stabilizers, and preservatives. In the practice of this disclosure, compositions can be administered, for example, by intravenous infusion, orally, topically, intraperitoneally, intravesically or intrathecally. Parenteral administration, oral administration, and intravenous administration are the preferred methods of administration. The formulations of compounds can be presented in unit-dose or multi-dose sealed containers, such as ampules and vials.

[0173] Injection solutions and suspensions can be prepared from sterile powders, granules, and tablets of the kind previously described. Cells transduced by nucleic acids for ex vivo therapy can also be administered intravenously or parenterally as described above.

[0174] The pharmaceutical preparation is preferably in unit dosage form. In such form the preparation is subdivided into unit doses containing appropriate quantities of the active component. The unit dosage form can be a packaged preparation, the package containing discrete quantities of preparation, such as packeted tablets, capsules, and powders in vials or ampoules. Also, the unit dosage form can be a capsule, tablet, cachet, or lozenge itself, or it can be the appropriate number of any of these in packaged form. The composition can, if desired, also contain other compatible therapeutic agents.

[0175] The combined administration contemplates co-administration, using separate formulations or a single pharmaceutical formulation, and consecutive administration in either order, wherein preferably there is a time period while both (or all) active agents simultaneously exert their biological activities.

[0176] Effective doses of the compositions provided herein vary depending upon many different factors, including means of administration, target site, physiological state of the patient, whether the patient is human or an animal, other medications administered, and whether treatment is prophylactic or therapeutic. However, a person of ordinary skill in the art would immediately recognize appropriate and/or equivalent doses looking at dosages of approved compositions for treating and preventing cancer for guidance.

[0177] As used herein, the term “pharmaceutically acceptable” is used synonymously with “physiologically acceptable” and “pharmacologically acceptable”. A pharmaceutical composition will generally comprise agents for buffering and preservation in storage, and can include buffers and carriers for appropriate delivery, depending on the route of administration. As used herein, the terms “pharmaceutically acceptable” or “pharmacologically acceptable” refer to a material which is not biologically or otherwise undesirable, i.e., the material may be administered to an individual in a formulation or composition without causing any unacceptable biological effects or interacting in a deleterious manner with any of the components of the composition in which it is contained.

[0178] As used herein, the terms “pharmaceutically acceptable excipient” and “pharmaceutically acceptable carrier” refer to a substance that aids the administration of an active agent to and absorption by a subject and can be included in the compositions of the present disclosure without causing a significant adverse toxicological effect on the patient. Non-limiting examples of pharmaceutically acceptable excipients include water, NaCl, normal saline solutions, lactated Ringer's, normal sucrose, normal glucose, binders, fillers, disintegrants, lubricants, coatings, sweeteners, flavors, salt solutions (such as Ringer's solution), alcohols, oils, gelatins, carbohydrates such as lactose, amylose or starch, fatty acid esters, hydroxymethycellulose, polyvinyl pyrrolidine, and colors, and the like. Such preparations can be sterilized and, if desired, mixed with auxiliary agents such as lubricants, preservatives, stabilizers, wetting agents, emulsifiers, salts for influencing osmotic pressure, buffers, coloring, and/or aromatic substances, and the like, that do not deleteriously react with the compounds of the disclosure. One of skill in the art will recognize that other pharmaceutical excipients are useful in the present disclosure.

[0179] As used herein, the term “pharmaceutically acceptable salt” refers to salts derived from a variety of organic and inorganic counter ions well known in the art and include, by way of example only, sodium, potassium, calcium, magnesium, ammonium, tetraalkylammonium, and the like; and when the molecule contains a basic functionality, salts of organic or inorganic acids, such as hydrochloride, hydrobromide, tartrate, mesylate, acetate, maleate, oxalate and the like.

[0180] As used herein, the term “preparation” is intended to include the formulation of the active compound with encapsulating material as a carrier providing a capsule in which the active component with or without other carriers, is surrounded by a carrier, which is thus in association with it. Similarly, cachets and lozenges are included. Tablets, powders, capsules, pills, cachets, and lozenges can be used as solid dosage forms suitable for oral administration.

[0181] The pharmaceutical preparation is optionally in unit dosage form. In such form the preparation is subdivided into unit doses containing appropriate quantities of the active component. The unit dosage form can be a packaged preparation, the package containing discrete quantities of preparation, such as packeted tablets, capsules, and powders in vials or ampoules. Also, the unit dosage form can be a capsule, tablet, cachet, or lozenge itself, or it can be the appropriate number of any of these in packaged form. The unit dosage form can be of a frozen dispersion.

[0182] The compositions of the present disclosure may additionally include components to provide sustained release and/or comfort. Such components include high molecular weight, anionic mucomimetic polymers, gelling polysaccharides and finely-divided drug carrier substrates. These components are discussed in greater detail in U.S. Pat. Nos. 4,911,920; 5,403,841; 5,212,162; and 4,861,760. The entire contents of these patents are incorporated herein by reference in their entirety for all purposes. The compositions of the present disclosure can also be delivered as microspheres for slow release in the body. For example, microspheres can be administered via intradermal injection of drug-containing microspheres, which slowly release subcutaneously (see Rao, J. Biomater Sci. Polym. Ed. 7:623-645, 1995; as biodegradable and injectable gel formulations (see, e.g., Gao Pharm. Res. 12:857-863, 1995); or, as microspheres for oral administration (see, e.g., Eyles, J. Pharm. Pharmacol. 49:669-674, 1997). In embodiments, the formulations of the compositions of the present disclosure can be delivered by the use of liposomes which fuse with the cellular membrane or are endocytosed, i.e., by employing receptor ligands attached to the liposome, that bind to surface membrane protein receptors of the cell resulting in endocytosis. By using liposomes, particularly where the liposome surface carries receptor ligands specific for target cells, or are otherwise preferentially directed to a specific organ, one can focus the delivery of the compositions of the present disclosure into the target cells in vivo. (See, e.g., Al-Muhammed, J. Microencapsul. 13:293-306, 1996; Chonn, Curr. Opin. Biotechnol. 6:698-708, 1995; Ostro, Am. J. Hosp. Pharm. 46:1576-1587, 1989). The compositions of the present disclosure can also be delivered as nanoparticles.

[0183] As used herein, the term “multimerization domain” refers to any type of molecule that is directly or indirectly associated with one or more MHC/peptide monomers. A multimerization domain is a molecule, a complex of molecules, or solid support, to which one or more MHC and/or MHC/peptide monomers can be attached. A multimerization domain can consist of one or more carriers and/or one or more scaffolds and may also contain one or more linkers connecting carrier to scaffold, carrier to carrier, and/or scaffold to scaffold. The multimerization domain may also contain one or more linkers that can be used for attachment of MHC/peptide monomers and/or other molecules to the multimerization domain. In this disclosure, a multimerization domain will in one embodiment refer to a functionalized polymer (e.g., dextran) that is capable of reacting with MHC/peptide monomers, thus covalently attaching the MHC/peptide monomer to the multimerization domain, or that is capable of reacting with scaffold molecules (e.g., streptavidin), thus covalently attaching streptavidin to the multimerization domain; the streptavidin then may bind MHC/peptide monomers. Multimerization domains include IgG, streptavidin, avidin, streptactin, micelles, cells, polymers, dextran, polysaccharides, beads and other types of solid support, and small organic molecules carrying reactive groups or carrying chemical motifs that can bind MHC/peptide monomers and other molecules, such as identified in detail herein elsewhere.

[0184] Non-limiting examples of suitable multimerization domain(s) are polysaccharides including dextran molecules, carboxy methyl dextran, dextran polyaldehyde, carboxymethyl dextran lactone, and cyclodextrins, pullulans, schizophyllan, scleroglucan, xanthan, gellan, O-ethylamino guaran, chitins and chitosans including 6-O-carboxymethyl chitin and N-carboxymethyl chitosan, derivatized cellolosics including carboxymethyl cellulose, carboxymethyl hydroxyethyl cellulose, hydroxy-ethyl cellulose, 6-amino-6-deoxy cellulose and O-ethyl-amine cellulose, hydroxylated starch, hydroxypropyl starch, hydroxyethyl starch, carrageenans, alginates, and agarose, synthetic polysaccharides including ficoll and carboxy-methylated ficoll, vinyl polymers including poly (acrylic acid), poly (acryl amides), poly (acrylic esters), poly (2-hydroxy ethyl methacrylate), poly (methyl methacrylate), poly (maleic acid), poly (maleic anhydride), poly (acrylamide), poly (ethyl-co-vinyl acetate), poly (methacrylic acid), poly (vinyl-alcohol), poly (vinyl alcohol-co-vinyl chloroacetate), aminated poly (vinyl alcohol), and co block polymers thereof, poly ethylene glycol (PEG) or polypropylene glycol or poly (ethylene oxide-co-propylene oxides) comprising polymer backbones including linear, comb-shaped or starburst dendrimers, poly amino acids including polylysines, polyglutamic acid, polyurethanes, poly (ethylene imines), pluriol, proteins including peptides, polypeptides, antigen binding peptides, albumins, immunoglobulins, coiled-coil helixes e.g. Fos-Jun or Fos-Jun like or coiled-coiled dimers/trimers/tetramers/pentamers, Streptavidin, Avidin, STREP-TACTIN®, T-cell receptors other protein receptors and virus-like proteins (VLP), and polynucleotides, DNA, RNA, PNA, LNA, oligonucleotides and oligonucleotide dendrimer constructs and small organic molecules including but not limited to steroids, peptides, linear or cyclic structures, aromatic structures, aliphatic structures.

[0185] As used herein, the term “dextran” refers to a complex, branched polysaccharide made of many glucose molecules joined into chains of varying lengths. The straight chain consists of α1->6 glycosidic linkages between glucose molecules, while branches begin from α1->3 linkages (and in some cases, α1->2 and α1->4 linkages as well).

[0186] The term “label” is used interchangeable with labeling molecule. Label as described herein is an identifiable substance that is detectable in an assay and that can be attached to a molecule creating a labeled molecule. The behavior of the labeled molecule can then be studied. Labels may be organic or inorganic molecules or particles. Labels may be organic or inorganic molecules or particles. Examples of labels include, but are not limited to, polymers, nucleic acids, DNA, RNA, oligonucleotides, peptides, fluorescent labels, phosphorescent labels, enzyme labels, chemiluminescent labels, bioluminescent labels, haptens, antibodies, dyes, nanoparticle labels, elements, metal particles, heavy metal labels, isotope labels, radioisotopes, stable isotopes, chains of isotopes and single atoms, or combination thereof. The labelling compound may suitably be selected from fluorescent labels such as 5-(and 6)-carboxyfluorescein, 5- or 6-carboxyfluorescein, 6-(fluorescein)-5-(and 6)-carboxamido hexanoic acid, fluorescein isothiocyanate (FITC), rhodamine, tetramethylrhodamine, and dyes such as Cy2, Cy3, and Cy5, optionally substituted coumarin including AMCA, PerCP, phycobiliproteins including R-phycoerythrin (RPE) and allophycoerythrin (APC), Texas Red, Princeton Red, Green fluorescent protein (GFP) and analogues thereof, and conjugates of R-phycoerythrin or allophycoerythrin and e.g. Cy5 or Texas Red, and inorganic fluorescent labels based on semiconductor nanocrystals (like quantum dot and Qdot™ nanocrystals), and time-resolved fluorescent labels based on lanthanides like Eu3+ and Sm3+. In one embodiment a MHC monomer or MHC multimer as defined herein comprises at least one nucleic acid label, such as a nucleotide label, for example an oligonucleotide label. Such nucleic acids labels are disclosed in WO 2015/188839 and WO 2015/185067 (which are hereby incorporated by reference).

[0187] The MHC/peptide multimer can comprise one or more labels such as only a singly label. The one or more labels can be directly attached to the MHC/peptide multimer or indirectly to the MHC/peptide multimer such as via one or more marker molecules carrying one or more labels. The one or more labels can be used for combinatorial use of labelling. The one or more labels can result in positive selection of said MHC/peptide multimer or alternatively in negative selection of said MHC/peptide multimer. The one or more labels can comprise one or more covalently attached labels and/or one or more non-covalently attached labels. The one or more labels can be covalently attached to polypeptide a of the MHC monomer, covalently attached to polypeptide b of the MHC monomer, covalently attached to the peptide and/or covalently attached to the one or more multimerization domains. Alternatively, the one or more labels can be non-covalently attached to polypeptide a of the MHC monomer, non-covalently attached to polypeptide b of the MHC monomer, non-covalently attached to the peptide and/or non-covalently attached to the one or more multimerization domains. In another embodiment the one or more labels can be covalently and/or non-covalently attached to the multimerization domain via a molecule, wherein the molecule e.g., can be selected from the group consisting of an antibody, an aptamer, a protein, a sugar residue and a nucleotide such as DNA. In a specific embodiment the one or more labels are attached to the MHC/peptide multimer via a streptavidin-biotin linkage.

[0188] In a particular embodiment the label is an oligonucleotide, such as a nucleic acid molecule comprises or consists of DNA, RNA, and/or artificial nucleotides such as PLA or LNA. In one embodiment the nucleic acid label comprises one or more of the following components: a barcode region, 5′ first primer region (forward), 3′ second primer region (reverse), random nucleotide region, connector molecule, stability-increasing components, short nucleotide linkers in between any of the above-mentioned components, adaptors for sequencing and annealing region. Preferably the nucleic acid label comprises at least a barcode region; where the barcode region comprises a sequence of consecutive nucleic acids. In one embodiment the nucleic acid label comprises or consists of DNA, RNA, artificial nucleic acids and/or Xeno nucleic acid (XNA). In one embodiment at least two different labels are attached to a MHC monomer or a MHC multimer, such as at least two different labels such as one fluorescent label and one nucleic acid label. The MHC/peptide multimer can comprise one or more fluorescent labels selected from the group of fluorescein isothiocyanate, rhodamine, phycoerythrin, phycocyanin, allophycocyanin, o-phthaldehyde, fluorescamine, 2-4′-maleimidylanilino)naphthalene-6-sulfonic acid sodium salt, 5-((((2-iodoacetyl)amino)ethyl)amino), naphthalene-1-sulfonic acid, Pyrene-1-butanoic acid, AlexaFluor 350 (7-amino-6-sulfonic acid-4-methyl coumarin-3-acetic acid, AMCA (7-amino-4-methyl coumarin-3-acetic acid), 7-hydroxy-4-methyl coumarin-3-acetic acid, Marina Blue (6,8-difluoro-7-hydroxy-4-methyl coumarin-3-acetic acid), 7-dimethylamino-coumarin-4-acetic acid, Fluorescamin-N-butyl amine adduct, 7-hydroxy-coumarine-3-carboxylic acid, CascadeBlue (pyrene-trisulphonic acid acetyl azide), Cascade Yellow, Pacific Blue (6,8 difluoro-7-hydroxy coumarin-3-carboxylic acid), 7-diethylamino-coumarin-3-carboxylic acid, N-(((4-azidobenzoyl)amino)ethyl)-4-amino-3,6-disulfo-1,8-naphthalimide, dipotassium salt), Alexa Fluor 430, 3-perylenedodecanoic acid, 8-hydroxypyrene-1,3,6-trisulfonic acid trisodium salt, 12-(N-(7-nitrobenz-2-oxa-1,3-diazol-4-yl)amino)dodecanoic acid, N,N′-dimethyl-N-(iodoacetyl)-N′-(7-nitrobenz-2-oxa-1,3-diazol-4-yl)ethylenediamine, Oregon Green 488 (difluoro carboxy fluorescein), 5-iodoacetamidofluorescein, propidium iodide-DNA adduct, Carboxy fluorescein, fluor dyes, Pacific Blue™, Pacific Orange™, Cascade Yellow™ AlexaFluor®(AF), AF®350, AF405, AF430, AF488, AF500, AF514, AF532, AF546, AF555, AF568, AF594, AF610, AF633, AF635, AF647, AF680, AF700, AF710, AF750, AF800, Quantum Dotbased dyes, QDot® Nanocrystals (Invitrogen, MolecularProbs), Qdot®525, Qdot®565, Qdot®585, Qdot®605, Qdot®655, Qdot®705, Qdot®800, DyLight™ Dyes (Pierce) (DL); DL549, DL649, DL680, DL800, Fluorescein (Flu) or any derivate of that, such as FITC, Cy-Dyes, Cy2, Cy3, Cy3.5, Cy5, Cy5.5, Cy7, 7-AAD, TO-Pro-3, fluorescent Proteins, R-Phycoerythrin (RPE), Phycobili Proteins, Allophycocyani (APC), PerCp, B-Phycoerythrin, C-Phycocyanin, APC, fluorescent proteins, Green fluorescent proteins; GFP and GFP derivated mutant proteins; BFP, CFP, YFP, DsRed, DSred-2, T1, Dimer2, mRFP1, MBanana, mOrange, dTomato, tdTomato, mTangerine, mStrawberry, mCherry, Tandem dyes, RPE-Cy5, RPE-Cy5.5, RPE-Cy7, RPE-AlexaFluor® tandem conjugates; RPE-Alexa610, RPE-TxRed, Tandem dyes with APC, APC-Aleca600, APC-Alexa610, APC-Alexa750, APC-Cy5, APC-Cy5.5, multi fluorochrome assemblies, FRET-based dyes (Fluorescence resonance energy transfer), ionophors; ion chelating fluorescent props, props that change wavelength when binding a specific ion, such as Calcium, props that change intensity when binding to a specific ion, such as Calcium, Calcium dyes, Indo-1-Ca2+, Indo-2-Ca2+.

[0189] The one or more labels can in a specific embodiment be selected from the group consisting of APC, APC-Cy7, ABC-H7, APC-R700, Alexa Flours™ 488, Alexa Flours™555, Alexa Flours™647, Alexa Flours™700, AmCyan, BB151, BB700, BUV395, BUV496, BUV563, BUV615, BUV661, BUV737, BUV805, BV421, BV480, BV510, BV605, BV711, BV750, BV786, FITC, PE, PE-CF594, PE-Cy5, PE-CY5.5, PE-cy7, Pasific Blue, PERCP, pPerCp-Cy5.5, PE, R718, RY586, V450 and V500 (wherein in BV means Brilliant violet, wherein BUV means Brilliant ultra violet and PE means R-Phycoerythrin). In another embodiment the one or more labels can be selected from the group consisting of cFluor®B515, cFluor®B532, cFluor®B548, cFluor®B675, cFluor®B690, cFluor®BY575, cFluor®BY610, cFluor®BY667, cFluor®BY710, cFluor®BY750, cFluor®BY781, cFluor®B250, cFluor®R659, cFluor®R668, cFluor®R685, cFluor®R720, cFluor®R780, cFluor®R840, cFluor®v420, cFluor®v547, cFluor®v450, cFluor®v610 and cFluor®YG610. The MHC/peptide multimer can comprise one or more labels which are one or more chemiluminescent labels such as one or more labels selected from the group consisting of luminol, isoluminol, theromatic acridinium ester, imidazole, acridinium salt, and oxalate ester. The MHC/peptide multimer can comprise one or more labels which are one or more bioluminescent labels such as one or more labels selected from the group consisting of luciferin, luciferase, and aequorin. The MHC/peptide multimer can comprise one or more labels which are one or more enzyme labels, such as one or more enzyme labels selected from the group peroxidases, malate dehydrogenase, staphylococcal nuclease, delta-5-steroid isomerase, yeast alcohol dehydrogenase, alpha-glycerophosphate, dehydrogenase, triose phosphate isomerase, horseradish peroxidase, alkaline phosphatase, asparaginase, glucose oxidase, beta-galactosidase, ribonuclease, urease, catalase, glucose-6-phosphate dehydrogenase, glucoamylase, and acetylcholinesterase. The MHC/peptide multimer can comprise one or more labels which are one or more chromophore labels. In another embodiment, the MHC/peptide multimer comprises one or more labels which are one or more metal labels. In yet another embodiment the MHC/peptide multimer comprises one or more labels which are one or more radioactive labels such as one or more labels selected from the group consisting of a radionuclide, an isotope, a label comprising α rays, a label comprising β rays or a label comprising γ rays. Any of the above embodiments regarding labels can be combined in any order.

### Example 1: SARS-CoV-2 Human CD4 and CD8 T-Cell Epitope Data

[0190] The present invention provides SARS-CoV-2 human CD4 and CD8 T-cell epitope data from 870 SARS-CoV-2 infected donors and 327 unexposed subjects using a variety of screening designs and assay methodologies. Epitopes have been identified from throughout the SARS-CoV-2 proteome, with a significant correlation between the number of epitopes defined and size of the antigen of provenance. Further analysis revealed discrete immunodominant regions and certain epitopes that are more prevalently recognized. 75 different HLA alleles have been identified as MHC restriction elements, and several studies addressed pre-existing reactivity and sequence conservation with endemic coronaviruses and other viruses. This remarkable breadth of epitope repertoire has implications for immune escape by SARS-CoV-2 mutants and variants.

TABLE 1
Listing of unique SARS-COV-2-derived CD4 and CD8 epitopes.

| SEQ | | | | | |
|---|---|---|---|---|---|
| ID | | | | | |
| NO: | Description | Ag | Dominant | Restriction | Allele(s) |
| 1 | SEETGTLIVNSVLLF | E | | CD4 | DQB1*03:01 |
| 2 | FLLVTLAILTALRLC | E | | CD4 | |
| 3 | LAILTALRLCAYCCN | E | | CD4 | DRB1*01:01, DRB1*11:01 |
| 4 | FYVYSRVKNLNSSRV | E | Yes | CD4 | |
| 5 | EELKKLLEQWNLVIG | M | | CD4 | DQB1*05:01, DQB1*05:02 |
| 6 | LLEQWNLVIGFLFLT | M | | CD4 | DQB1*02:01, DQB1*05:03 |
| 7 | NLVIGFLFLTWICLL | M | | CD4 | DQB1*05:01, DRB1*01:02 |
| 8 | FLFLTWICLLQFAYA | M | | CD4 | DQB1*05:01, DQB1*05:03, |
| | | | | | DRB1*01:02 |
| 9 | WICLLQFAYANRNRF | M | | CD4 | DQB1*05:03, DRB1*03:01, |
| | | | | | DRB1*14:01 |
| 10 | QFAYANRNRFLYIIK | M | Yes | CD4 | DRB1*14:01 |
| 11 | NRNRFLYIIKLIFLW | M | | CD4 | DQB1*02:01, DQB1*05:03, |
| | | | | | DRB1*03:01, DRB1*12:01 |
| 12 | LYIIKLIFLWLLWPV | M | | CD4 | DQB1*02:01, DRB1*12:01 |
| 13 | LIFLWLLWPVTLACF | M | | CD4 | DQB1*05:01, DQB1*05:03, |
| | | | | | DRB1*01:02 |
| 14 | LLWPVTLACFVLAAV | M | | CD4 | DQB1*05:01, DQB1*05:03, |
| | | | | | DQB1*06:03 |
| 15 | VLAAVYRINWITGGI | M | Yes | CD4 | DQB1*05:01, DQB1*05:03, |
| | | | | | DRB1*12:02, DRB1*14:01 |
| 16 | YRINWITGGIAIAMA | M | Yes | CD4 | DQB1*02:02, DQB1*03:01, |
| | | | | | DQB1*05:01, DQB1*05:02, |
| | | | | | DQB1*05:03, DQB1*06:02, |
| | | | | | DQB1*06:03, DRB1*07:01, |
| | | | | | DRB1*10:01, DRB1*12:01, |
| | | | | | DRB1*13:01, DRB1*14:01, |
| | | | | | DRB1*15:01, DRB1*16:01 |
| 17 | ITGGIAIAMACLVGL | M | | CD4 | DQB1*03:01 |
| 18 | AIAMACLVGLMWLSY | M | | CD4 | |
| 19 | CLVGLMWLSYFIASF | M | Yes | CD4 | DQB1*05:01, DQB1*05:03, |
| | | | | | DRB1*12:01, DRB1*12:02 |
| 20 | MWLSYFIASFRLFAR | M | Yes | CD4 | DQB1*02:01, DQB1*05:01, |
| | | | | | DQB1*05:02, DQB1*05:03, |
| | | | | | DRB1*03:01, DRB1*14:01, |
| | | | | | DRB1*14:06, DRB1*16:01, |
| | | | | | DRB1*16:02 |
| 21 | FIASFRLFARTRSMW | M | | CD4 | DQB1*05:03, DRB1*03:01, |
| | | | | | DRB1*14:01 |
| 22 | RLFARTRSMWSFNPE | M | | CD4 | DQB1*05:03, DRB1*14:01 |
| 23 | TRSMWSFNPETNILL | M | | CD4 | DQB1*05:01, DQB1*05:02, |
| | | | | | DQB1*05:03, DRB1*01:02 |
| 24 | SFNPETNILLNVPLH | M | | CD4 | DRB1*01:02 |
| 25 | TNILLNVPLHGTILT | M | Yes | CD4 | DRB1*10:01, DRB1*12:02, |
| | | | | | DRB1*14:01, DRB1*14:06, |
| | | | | | DRB1*15:01, DRB1*16:02 |
| 26 | NVPLHGTILTRPLLE | M | | CD4 | |
| 27 | GTILTRPLLESELVI | M | | CD4 | DRB1*13:01 |
| 28 | RPLLESELVIGAVIL | M | | CD4 | DQB1*02:02 |
| 29 | SELVIGAVILRGHLR | M | Yes | CD4 | DQB1*06:02, DQB1*06:03, |
| | | | | | DRB1*01:02, DRB1*13:01, |
| | | | | | DRB1*14:01, DRB1*15:01, |
| | | | | | DRB1*16:01 |
| 30 | GAVILRGHLRIAGHH | M | Yes | CD4 | |
| | LGR | | | | |
| 31 | GAVILRGHLRIAGHH | M | | CD4 | DRB1*13:01, DRB1*15:01 |
| 32 | LRGHLRIAGHHLGRC | M | Yes | CD4 | DRB1*11:01, DRB1*11:04 |
| 33 | RGHLRIAGHHLGRCD | M | Yes | CD4 | DRB1*07:01, DRB1*13:01, |
| | | | | | DRB1*14:01, DRB1*15:01 |
| 34 | LRIAGHHLGRCDIKD | M | | CD4 | |
| 35 | IAGHHLGRCDIKDLP | M | Yes | CD4 | |
| 36 | LGRCDIKDLPKEITV | M | Yes | CD4 | |
| 37 | IKDLPKEITVATSRT | M | Yes | CD4 | |
| 38 | KEITVATSRTLSYYK | M | Yes | CD4 | DQB1*06:03, DRB1*03:01, |
| | | | | | DRB1*07:01, DRB1*14:01, |
| | | | | | DRB1*14:06, DRB1*15:01, |
| | | | | | DRB1*16:02 |
| 39 | ATSRTLSYYKLGASQ | M | | CD4 | DQB1*05:01, DQB1*05:03, |
| | | | | | DRB1*16:01 |
| 40 | TSRTLSYYKLGASQR | M | Yes | CD4 | |
| | VA | | | | |
| 41 | SRTLSYYKLGASQRV | M | Yes | CD4 | DRB5*01:01, DRB5*01:02 |
| 42 | LSYYKLGASQRVAGD | M | Yes | CD4 | DQB1*03:01, DQB1*06:02, |
| | | | | | DQB1*06:03, DRB1*01:01, |
| | | | | | DRB1*07:01, DRB1*14:06, |
| | | | | | DRB1*15:01, DRB1*16:01, |
| | | | | | DRB1*16:02 |
| 43 | SYYKLGASQRVAGDS | M | Yes | CD4 | DQB1*03:01, DRB1*01:01, |
| | | | | | DRB1*07:01 |
| 44 | LGASQRVAGDSGFAA | M | Yes | CD4 | |
| 45 | RVAGDSGFAAYSRYR | M | | CD4 | |
| 46 | SGFAAYSRYRIGNYK | M | Yes | CD4 | DRB1*15:01 |
| 47 | YSRYRIGNYKLNTDH | M | | CD4 | |
| 48 | IGNYKLNTDHSSSSD | M | | CD4 | DRB1*03:01 |
| 49 | LNTDHSSSSDNIALL | M | | CD4 | |
| 50 | PQNQRNAPRITFGGP | N | | CD4 | |
| 51 | NAPRITFGGPSDSTG | N | | CD4 | DQB1*03:01 |
| 52 | TFGGPSDSTGSNQNG | N | | CD4 | DQB1*03:01 |
| 53 | ASWFTALTQHGKEDL | N | Yes | CD4 | |
| 54 | SWFTALTQHGKEDLK | N | Yes | CD4 | |
| 55 | LTQHGKEDLKFPRGQ | N | | CD4 | |
| 56 | FPRGQGVPINTNSSP | N | | CD4 | |
| 57 | GVPINTNSSPDDQIG | N | | CD4 | |
| 58 | DDQIGYYRRATRRIR | N | Yes | CD4 | DRB1*01:03, DRB1*07:01, |
| | | | | | DRB1*13:01, DRB1*14:01, |
| | | | | | DRB1*14:06, DRB1*15:01, |
| | | | | | DRB1*16:02 |
| 59 | IGYYRRATRRIRGGD | N | Yes | CD4 | |
| 60 | YYRRATRRIRGGDGK | N | Yes | CD4 | DRB1*13:01, DRB1*14:06 |
| 61 | TRRIRGGDGKMKDLS | N | | CD4 | |
| 62 | GGDGKMKDLSPRWYF | N | | CD4 | |
| 63 | MKDLSPRWYFYYLGT | N | | CD4 | |
| | GPEAG | | | | |
| 64 | MKDLSPRWYFYYLGT | N | Yes | CD4 | |
| 65 | PRWYFYYLGTGPEAG | N | | CD4 | DQB1*02:01, DQB1*05:03 |
| 66 | RWYFYYLGTGPEAGL | N | Yes | CD4 | |
| 67 | LPYGANKDGIIWVAT | N | | CD4 | |
| 68 | NKDGIIWVATEGALN | N | Yes | CD4 | DQB1*02:01, DQB1*02:02, |
| | | | | | DQB1*03:02, DQB1*05:03, |
| | | | | | DRB1*04:04, DRB1*07:01 |
| 69 | KDGIIWVATEGALNT | N | Yes | CD4 | |
| 70 | IWVATEGALNTPKDH | N | | CD4 | |
| 71 | EGALNTPKDHIGTRN | N | | CD4 | |
| 72 | AIVLQLPQGTTLPKG | N | Yes | CD4 | |
| 73 | AGNGGDAALALLLLD | N | Yes | CD4 | DQB1*03:01, DQB1*06:02 |
| 74 | DAALALLLLDRLNQL | N | Yes | CD4 | DQB1*05:01, DQB1*05:03, |
| | | | | | DQB1*06:02, DRB1*03:01, |
| | | | | | DRB1*11:01, DRB1*12:01, |
| | | | | | DRB1*14:01, DRB1*15:01 |
| 75 | LLLLDRLNQLESKMS | N | Yes | CD4 | DQB1*05:01, DRB1*03:01, |
| | | | | | DRB1*11:01, DRB1*12:01, |
| | | | | | DRB1*14:01, DRB1*15:01 |
| 76 | GKGQQQQGQTVTKKS | N | | CD4 | |
| 77 | AAEASKKPRQKRTAT | N | Yes | CD4 | |
| 78 | KKPRQKRTATKAYNV | N | Yes | CD4 | |
| 79 | KPRQKRTATKAYNVT | N | | CD4 | DPB1*14:01 |
| 80 | KRTATKAYNVTQAFG | N | Yes | CD4 | DQB1*06:02, DQB1*06:03 |
| 81 | KAYNVTQAFGRRGPE | N | Yes | CD4 | |
| 82 | TQAFGRRGPEQTQGN | N | | CD4 | |
| 83 | RRGPEQTQGNFGDQE | N | | CD4 | |
| 84 | FGDQELIRQGTDYKH | N | | CD4 | |
| 85 | LIRQGTDYKHWPQIA | N | Yes | CD4 | |
| 86 | TDYKHWPQIAQFAPS | N | | CD4 | |
| 87 | YKHWPQIAQFAPSAS | N | Yes | CD4 | |
| 88 | WPQIAQFAPSASAFF | N | Yes | CD4 | DQB1*02:02, DQB1*05:03, |
| | | | | | DRB1*04:04, DRB1*07:01, |
| | | | | | DRB1*15:01 |
| 89 | QFAPSASAFFGMSRI | N | | CD4 | DRB1*07:01 |
| 90 | ASAFFGMSRIGMEVT | N | Yes | CD4 | DQB1*05:03, DRB1*01:02, |
| | | | | | DRB1*14:01 |
| 91 | AFFGMSRIGMEVTPS | N | | CD4 | |
| 92 | GMEVTPSGTWLTYTG | N | Yes | CD4 | |
| | AIKLD | | | | |
| 93 | GMEVTPSGTWLTYTG | N | | CD4 | |
| 94 | PSGTWLTYTGAIKLD | N | Yes | CD4 | DQB1*06:03, DRB1*01:02, |
| | | | | | DRB1*01:03, DRB1*07:01, |
| | | | | | DRB1*15:01 |
| 95 | GTWLTYTGAIKLDDK | N | Yes | CD4 | |
| 96 | TWLTYTGAIKLDDKD | N | | CD4 | |
| | PNF | | | | |
| 97 | LTYTGAIKLDDKDPN | N | | CD4 | DRB1*07:01 |
| 98 | AIKLDDKDPNFKDQV | N | | CD4 | DRB1*03:01 |
| 99 | PNFKDQVILLNKHID | N | | CD4 | |
| | AYK | | | | |
| 100 | FKDQVILLNKHIDAY | N | Yes | CD4 | DRB1*03:01, DRB1*14:01, |
| | | | | | DRB1*14:06, DRB1*15:01, |
| | | | | | DRB1*16:02 |
| 101 | ILLNKHIDAYKTFPP | N | Yes | CD4 | DRB1*14:06, DRB1*15:01 |
| 102 | HIDAYKTFPPTEPKK | N | | CD4 | |
| 103 | QKKQQTVTLLPAADL | N | | CD4 | DRB1*01:02 |
| 104 | KQQTVILLPAADLDD | N | | CD4 | |
| | F | | | | |
| 105 | TVTLLPAADLDDFSK | N | | CD4 | DQB1*05:03, DRB1*01:02 |
| 106 | AADLDDFSKQLQQSM | N | | CD4 | |
| 107 | PLNSIIKTIQPRVEK | NSP2 | | CD4 | DRB1*01:01, DRB1*07:01 |
| 108 | EEIAIILASFSASTS | NSP2 | | CD4 | DQB1*02:02, DQB1*03:02, |
| | | | | | DRB1*04:10, DRB1*07:01 |
| 109 | SPLYAFASEAARVVR | NSP2 | | CD4 | DQB1*02:02, DRB1*07:01 |
| 110 | AITILDGISQYSLRL | NSP2 | | CD4 | |
| 111 | QTFFKLVNKFLALCA | NSP2 | | CD4 | DQB1*05:01, DRB1*01:03, |
| | | | | | DRB1*07:01 |
| 112 | GETFVTHSKGLYRKC | NSP2 | | CD4 | DRB1*07:01 |
| 113 | ADAVIKTLQPVSELL | NSP3 | | CD4 | DRB1*14:01 |
| 114 | ESDDYIATNGPLKVG | NSP3 | | CD4 | |
| 115 | IATNGPLKVGGSCVL | NSP3 | | CD4 | DRB1*13:02 |
| 116 | SGHNLAKHCLHVVGP | NSP3 | | CD4 | |
| 117 | NLYDKLVSSFLEMKS | NSP3 | | CD4 | DQB1*05:02, DRB1*14:01 |
| 118 | ENLLLYIDINGNLHP | NSP3 | | CD4 | |
| 119 | KSAFYILPSIISNEK | NSP3 | | CD4 | |
| 120 | RFYFYTSKTTVASLI | NSP3 | | CD4 | DQB1*06:01, DRB1*14:01, |
| | | | | | DRB1*15:02 |
| 121 | EAARYMRSLKVPATV | NSP3 | | CD4 | DRB1*07:01 |
| 122 | LPNDDTLRVEAFEYY | NSP3 | | CD4 | DQB1*03:02 |
| 123 | TLRVEAFEYYHTTDP | NSP3 | | CD4 | DQB1*05:03 |
| 124 | HTTDPSFLGRYMSAL | NSP3 | | CD4 | |
| 125 | SFLGRYMSALNHTKK | NSP3 | | CD4 | DRB1*04:04 |
| 126 | YMSALNHTKKWKYPQ | NSP3 | | CD4 | |
| 127 | NHTKKWKYPQVNGLT | NSP3 | | CD4 | |
| 128 | ESPFVMMSAPPAQYE | NSP3 | | CD4 | |
| 129 | YCIDGALLTKSSEYK | NSP3 | | CD4 | DRB1*15:02 |
| 130 | DNFKFVCDNIKFADD | NSP3 | | CD4 | DQB1*05:01 |
| 131 | LNQLTGYKKPASREL | NSP3 | | CD4 | |
| 132 | GYKKPASRELKVTFF | NSP3 | | CD4 | |
| 133 | ASRELKVTFFPDLNG | NSP3 | | CD4 | DQB1*05:03 |
| 134 | KVTFFPDLNGDVVAI | NSP3 | Yes | CD4 | DQB1*02:02, DQB1*05:01, |
| | | | | | DQB1*05:03 |
| 135 | PDLNGDVVAIDYKHY | NSP3 | | CD4 | |
| 136 | TPSFKKGAKLLHKPI | NSP3 | | CD4 | |
| 137 | VWHVNNATNKATYKP | NSP3 | | CD4 | |
| 138 | MAAYVDNSSLTIKKP | NSP3 | | CD4 | DQB1*05:03 |
| 139 | NELSRVLGLKTLATH | NSP3 | | CD4 | DRB1*07:01 |
| 140 | TFTRSTNSRIKASMP | NSP3 | | CD4 | DRB1*14:01 |
| 141 | TNSRIKASMPTTIAK | NSP3 | | CD4 | DRB1*04:04, DRB1*07:01 |
| 142 | NTVKSVGKFCLEASF | NSP3 | | CD4 | |
| 143 | LEASFNYLKSPNFSK | NSP3 | | CD4 | DRB1*04:10, DRB1*07:01 |
| 144 | PNFSKLINIIIWFLL | NSP3 | | CD4 | DRB1*07:01, DRB1*15:01 |
| 145 | GSLIYSTAALGVLMS | NSP3 | | CD4 | DQB1*03:01, DRB1*01:01, |
| | | | | | DRB1*11:01 |
| 146 | ISSFKWDLTAFGLVA | NSP3 | | CD4 | DQB1*02:02, DRB1*07:01 |
| 147 | WDLTAFGLVAEWFLA | NSP3 | | CD4 | DQB1*05:03 |
| 148 | FGLVAEWFLAYILFT | NSP3 | | CD4 | DQB1*05:03, DRB1*12:01 |
| 149 | FDAYVNTFSSTFNVP | NSP3 | | CD4 | DQB1*02:02, DRB1*07:01 |
| 150 | SHNIALIWNVKDFMS | NSP3 | | CD4 | DQB1*02:02, DQB1*03:02, |
| | | | | | DQB1*04:02, DRB1*04:10 |
| 151 | KGGKIVNNWLKQLIK | NSP4 | | CD4 | DRB1*13:01 |
| 152 | LFVAAIFYLITPVHV | NSP4 | | CD4 | DQB1*02:02, DQB1*05:01, |
| 153 | AVITREVGFVVPGLP | NSP4 | | CD4 | DRB1*01:03, DRB1*07:01 |
| 154 | VPGLPGTILRTINGD | NSP4 | | CD4 | |
| 155 | FLHFLPRVFSAVGNI | NSP4 | | CD4 | DRB1*15:01 |
| 156 | DTRYVLMDGSIIQFP | NSP4 | | CD4 | DQB1*03:02, DQB1*05:01, |
| | | | | | DRB1*04:04, DRB1*10:01 |
| 157 | SIVAGGIVAIVVTCL | NSP4 | | CD4 | DQB1*03:02, DQB1*04:02 |
| 158 | FGEYSHVVAFNTLLF | NSP4 | | CD4 | DQB1*02:02, DQB1*03:02, |
| | | | | | DRB1*04:10, DRB1*07:01 |
| 159 | NTLLFLMSFTVLCLT | NSP4 | | CD4 | |
| 160 | PVYSFLPGVYSVIYL | NSP4 | | CD4 | DRB1*15:01 |
| 161 | YLTFYLTNDVSFLAH | NSP4 | | CD4 | DQB1*05:02, DRB1*14:01, |
| | | | | | DRB1*15:01, DRB1*16:01 |
| 162 | SFLAHIQWMVMFTPL | NSP4 | | CD4 | DQB1*06:02, DRB1*15:01 |
| 163 | IQWMVMFTPLVPFWI | NSP4 | | CD4 | DQB1*02:02, DRB1*04:04, |
| | | | | | DRB1*07:01 |
| 164 | MFTPLVPFWITIAYI | NSP4 | | CD4 | DRB1*15:01 |
| 165 | TIAYIICISTKHFYW | NSP4 | | CD4 | DRB1*01:03, DRB1*07:01 |
| 166 | KHFYWFFSNYLKRRV | NSP4 | Yes | CD4 | DQB1*02:02, DQB1*04:02, |
| | | | | | DRB1*04:10, DRB1*07:01, |
| | | | | | DRB1*09:01, DRB1*15:01 |
| 167 | CTFLLNKEMYLKLRS | NSP4 | | CD4 | DQB1*05:01, DRB1*01:01, |
| | | | | | DRB1*11:01 |
| 168 | LTQYNRYLALYNKYK | NSP4 | | CD4 | DRB1*15:01 |
| 169 | RYLALYNKYKYFSGA | NSP4 | | CD4 | DRB1*15:01 |
| 170 | YREAACCHLAKALND | NSP4 | | CD4 | |
| 171 | CCHLAKALNDFSNSG | NSP4 | | CD4 | |
| 172 | FSNSGSDVLYQPPQT | NSP4 | | CD4 | DQB1*06:02 |
| 173 | SDVLYQPPQTSITSA | NSP4 | | CD4 | |
| 174 | NHNFLVQAGNVQLRV | NSP5 | | CD4 | DQB1*03:01, DQB1*06:02, |
| | | | | | DRB1*01:01, DRB1*07:01, |
| | | | | | DRB1*08:03, DRB1*15:01 |
| 175 | QNCVLKLKVDTANPK | NSP5 | | CD4 | DRB1*04:10 |
| 176 | LLVLVQSTQWSLFFF | NSP6 | | CD4 | DQB1*02:02, DRB1*07:01 |
| 177 | SLFFFLYENAFLPFA | NSP6 | | CD4 | DQB1*05:01, DRB1*01:01, |
| | | | | | DRB1*15:01 |
| 178 | LCLFLLPSLATVAYF | NSP6 | | CD4 | DQB1*05:01, DQB1*06:02, |
| | | | | | DRB1*01:01, DRB1*15:01 |
| 179 | TLVYKVYYGNALDQA | NSP6 | | CD4 | DQB1*05:01, DRB1*01:01, |
| | | | | | DRB1*15:01 |
| 180 | NRYFRLTLGVYDYLV | NSP6 | Yes | CD4 | DQB1*02:02, DQB1*05:01, |
| | | | | | DQB1*06:02, DRB1*01:01, |
| | | | | | DRB1*01:03, DRB1*07:01, |
| | | | | | DRB1*08:03, DRB1*15:01 |
| 181 | DAFKLNIKLLGVGGK | NSP6 | | CD4 | DRB1*01:01, DRB1*11:01 |
| 182 | RVESSSKLWAQCVQL | NSP7 | | CD4 | |
| 183 | SKLWAQCVQLHNDIL | NSP7 | | CD4 | |
| 184 | VLKKLKKSLNVAKSE | NSP8 | | CD4 | DRB1*08:03, DRB1*12:02 |
| 185 | LIVTALRANSAVKLQ | NSP8 | | CD4 | DQB1*06:03, DRB1*07:01, |
| | | | | | DRB1*13:01 |
| 186 | VLSFCAFAVDAAKAY | NSP10 | | CD4 | DQB1*02:02, DQB1*05:01, |
| | | | | | DRB1*01:03, DRB1*07:01 |
| 187 | PDILRVYANLGERVR | NSP12 | | CD4 | DQB1*06:01, DRB1*08:03, |
| | | | | | DRB1*12:02 |
| 188 | SLLMPILTLTRALTA | NSP12 | | CD4 | DQB1*06:02, DRB1*08:03, |
| | | | | | DRB1*15:01 |
| 189 | HCANFNVLFSTVFPP | NSP12 | | CD4 | DQB1*02:02, DQB1*06:02, |
| | | | | | DRB1*07:01 |
| 190 | NVLFSTVFPPTSFGP | NSP12 | | CD4 | DQB1*02:02 |
| 191 | QDALFAYTKRNVIPT | NSP12 | | CD4 | |
| 192 | KLLKSIAATRGATVV | NSP12 | | CD4 | DQB1*03:03, DRB1*04:04, |
| | | | | | DRB1*07:01, DRB1*10:01 |
| 193 | IAATRGATVVIGTSK | NSP12 | | CD4 | DQB1*03:03, DRB1*07:01 |
| 194 | YPKCDRAMPNMLRIM | NSP12 | | CD4 | |
| 195 | RAMPNMLRIMASLVL | NSP12 | | CD4 | DQB1*06:02, DRB1*15:01 |
| 196 | SHRFYRLANECAQVL | NSP12 | | CD4 | DRB1*01:01, DRB1*08:01 |
| 197 | SEMVMCGGSLYVKPG | NSP12 | | CD4 | |
| 198 | FNICQAVTANVNALL | NSP12 | | CD4 | DQB1*03:01, DRB1*14:01 |
| 199 | AVTANVNALLSTDGN | NSP12 | | CD4 | |
| 200 | EFYAYLRKHFSMMIL | NSP12 | | CD4 | DQB1*04:02, DRB1*07:01, |
| | | | | | DRB1*09:01, DRB1*13:01 |
| 201 | LRKHFSMMILSDDAV | NSP12 | | CD4 | DRB1*01:03, DRB1*11:02, |
| | | | | | DRB1*13:03 |
| 202 | GLVASIKNFKSVLYY | NSP12 | | CD4 | DQB1*06:01, DRB1*08:03, |
| | | | | | DRB1*12:02 |
| 203 | KTDGTLMIERFVSLA | NSP12 | | CD4 | |
| 204 | LMIERFVSLAIDAYP | NSP12 | Yes | CD4 | DQB1*02:02, DQB1*03:01, |
| | | | | | DQB1*03:02, DQB1*04:02, |
| | | | | | DQB1*05:01, DQB1*06:01, |
| | | | | | DQB1*06:04, DRB1*01:01, |
| | | | | | DRB1*01:03, DRB1*04:04, |
| | | | | | DRB1*07:01, DRB1*08:03, |
| | | | | | DRB1*10:01, DRB1*12:02, |
| | | | | | DRB1*13:02, DRB1*15:01 |
| 205 | FVSLAIDAYPLTKHP | NSP12 | | CD4 | DQB1*02:02, DQB1*03:02, |
| | | | | | DQB1*06:04, DRB1*15:01 |
| 206 | IDAYPLTKHPNQEYA | NSP12 | | CD4 | |
| 207 | DVFHLYLQYIRKLHD | NSP12 | | CD4 | DRB1*04:04, DRB1*13:02 |
| 208 | TSHKLVLSVNPYVCN | NSP13 | | CD4 | DQB1*06:03, DRB1*07:01, |
| | | | | | DRB1*13:01 |
| 209 | ELHLSWEVGKPRPPL | NSP13 | | CD4 | |
| 210 | PRPPLNRNYVFTGYR | NSP13 | | CD4 | |
| 211 | FTGYRVTKNSKVQIG | NSP13 | | CD4 | DRB1*07:01 |
| 212 | VTKNSKVQIGEYTFE | NSP13 | | CD4 | |
| 213 | VNARLRAKHYVYIGD | NSP13 | | CD4 | |
| 214 | ISPYNSQNAVASKIL | NSP13 | | CD4 | DQB1*06:02, DRB1*01:01 |
| 215 | NVNRFNVAITRAKVG | NSP13 | | CD4 | DQB1*03:01, DQB1*06:02, |
| | | | | | DRB1*08:03, DRB1*15:01 |
| 216 | NMFITREEAIRHVRA | NSP14 | | CD4 | DRB1*01:01, DRB1*11:01 |
| 217 | REEAIRHVRAWIGFD | NSP14 | | CD4 | DRB1*01:03, DRB1*07:01 |
| 218 | PLMYKGLPWNVVRIK | NSP14 | | CD4 | DQB1*03:01, DQB1*06:01, |
| | | | | | DRB1*08:03, DRB1*12:02 |
| 219 | LDDFVEIIKSQDLSV | NSP15 | Yes | CD4 | |
| 220 | EIIKSQDLSVVSKVV | NSP15 | | CD4 | DRB1*04:04 |
| 221 | TQLCQYLNTLTLAVP | NSP16 | | CD4 | DQB1*05:01, DQB1*06:02, |
| | | | | | DRB1*01:01, DRB1*15:01 |
| 222 | AVMSLKEGQINDMIL | NSP16 | | CD4 | |
| 223 | KEGQINDMILSLLSK | NSP16 | | CD4 | |
| 224 | RENNRVVISSDVLVN | NSP16 | | CD4 | DQB1*02:02, DRB1*07:01 |
| 225 | FMRIFTIGTVTLKQG | ORF3a | Yes | CD4 | |
| 226 | SDFVRATATIPIQAS | ORF3a | | CD4 | DQB1*02:02, DRB1*07:01 |
| 227 | ALLAVFQSASKIITL | ORF3a | | CD4 | DQB1*03:01, DQB1*06:03, |
| | | | | | DRB1*07:01, DRB1*11:01, |
| | | | | | DRB1*13:01 |
| 228 | KIITLKKRWQLALSK | ORF3a | | CD4 | DRB1*11:01 |
| 229 | KKRWQLALSKGVHFV | ORF3a | Yes | CD4 | DQB1*04:02, DRB1*07:01, |
| | | | | | DRB1*09:01 |
| 230 | CNLLLLFVTVYSHLL | ORF3a | | CD4 | DQB1*02:01, DRB1*07:01, |
| | | | | | DRB1*11:01 |
| 231 | LVAAGLEAPFLYLYA | ORF3a | | CD4 | DQB1*02:01, DQB1*02:02 |
| 232 | LEAPFLYLYALVYFL | ORF3a | | CD4 | DQB1*02:01, DRB1*11:01 |
| 233 | LYLYALVYFLQSINF | ORF3a | Yes | CD4 | DQB1*02:01, DQB1*03:02, |
| | | | | | DQB1*05:03, DRB1*11:01, |
| | | | | | DRB1*12:01 |
| 234 | LVYFLQSINFVRIIM | ORF3a | | CD4 | DQB1*05:03, DQB1*06:03, |
| | | | | | DRB1*07:01, DRB1*12:01, |
| | | | | | DRB1*13:01, DRB1*14:01 |
| 235 | QSINFVRIIMRLWLC | ORF3a | Yes | CD4 | DQB1*06:02, DRB1*03:01, |
| | | | | | DRB1*07:01, DRB1*11:01, |
| | | | | | DRB1*12:01, DRB1*13:01, |
| | | | | | DRB1*14:01, DRB1*15:01 |
| 236 | VRIIMRLWLCWKCRS | ORF3a | | CD4 | DRB1*11:01 |
| 237 | RLWLCWKCRSKNPLL | ORF3a | | CD4 | |
| 238 | KNPLLYDANYFLCWH | ORF3a | | CD4 | DQB1*02:02, DQB1*05:03, |
| | | | | | DRB1*15:01 |
| 239 | YDANYFLCWHTNCYD | ORF3a | | CD4 | |
| 240 | FLCWHTNCYDYCIPY | ORF3a | | CD4 | DQB1*05:03 |
| 241 | TNCYDYCIPYNSVTS | ORF3a | | CD4 | DQB1*05:01 |
| 242 | YFTSDYYQLYSTQLS | ORF3a | | CD4 | DRB1*16:02 |
| 243 | TDTGVEHVTFFIYNK | ORF3a | | CD4 | |
| 244 | EHVTFFIYNKIVDEP | ORF3a | | CD4 | DQB1*02:01, DQB1*05:01, |
| | | | | | DRB1*08:01, DRB1*11:01 |
| 245 | FIYNKIVDEPEEHVQ | ORF3a | | CD4 | DQB1*05:01, DRB1*08:01 |
| 246 | GSSGVVNPVMEPIYD | ORF3a | | CD4 | DQB1*04:02 |
| 247 | MFHLVDFQVTIAEIL | ORF6 | | CD4 | DRB1*13:03 |
| 248 | IAEILLIIMRTFKVS | ORF6 | | CD4 | DRB1*01:03, DRB1*07:01 |
| 249 | AEILLIIMRTFKVSI | ORF6 | | CD4 | |
| 250 | LIIMRTFKVSIWNLD | ORF6 | | CD4 | DQB1*05:01, DRB1*01:01, |
| | | | | | DRB1*11:01 |
| 251 | TFKVSIWNLDYIINL | ORF6 | | CD4 | DQB1*02:02, DQB1*05:01, |
| | | | | | DRB1*01:03, DRB1*07:01, |
| | | | | | DRB1*15:01 |
| 252 | IWNLDYIINLIIKNL | ORF6 | Yes | CD4 | DQB1*05:01, DRB1*01:01, |
| | | | | | DRB1*15:01 |
| 253 | YIINLIIKNLSKSLT | ORF6 | | CD4 | DRB1*11:02, DRB1*13:03 |
| 254 | MKIILFLALITLATC | ORF7a | | CD4 | |
| 255 | IILFLALITLATCEL | ORF7a | | CD4 | |
| 256 | DGVKHVYQLRARSVS | ORF7a | | CD4 | |
| | PKL | | | | |
| 257 | VKHVYQLRARSVSPK | ORF7a | | CD4 | DRB1*01:03, DRB1*07:01 |
| 258 | QEEVQELYSPIFLIV | ORF7a | Yes | CD4 | |
| 259 | LYSPIFLIVAAIVFI | ORF7a | | CD4 | |
| 260 | SPIFLIVAAIVFITL | ORF7a | | CD4 | |
| 261 | DFYLCFLAFLLFLVL | ORF7b | | CD4 | |
| 262 | MKFLVFLGIITTVAA | ORF8 | | CD4 | |
| 263 | FLGIITTVAAFHQEC | ORF8 | | CD4 | DQB1*02:02, DQB1*03:02, |
| | | | | | DQB1*06:03, DRB1*01:03, |
| | | | | | DRB1*04:02, DRB1*07:01 |
| 264 | TTVAAFHQECSLQSC | ORF8 | | CD4 | DQB1*05:02 |
| 265 | FHQECSLQSCTQHQP | ORF8 | | CD4 | |
| 266 | SLQSCTQHQPYVVDD | ORF8 | | CD4 | |
| 267 | TQHQPYVVDDPCPIH | ORF8 | Yes | CD4 | DRB1*13:02 |
| 268 | YVVDDPCPIHFYSKW | ORF8 | Yes | CD4 | DRB1*13:02, DRB1*15:02 |
| 269 | PCPIHFYSKWYIRVG | ORF8 | Yes | CD4 | DRB1*08:02, DRB1*13:01, |
| | | | | | DRB1*15:01, DRB1*15:02, |
| | | | | | DRB1*16:01 |
| 270 | FYSKWYIRVGARKSA | ORF8 | Yes | CD4 | DQB1*06:01, DRB1*01:01, |
| | | | | | DRB1*04:02, DRB1*07:01, |
| | | | | | DRB1*11:01, DRB1*11:04, |
| | | | | | DRB1*13:03, DRB1*14:01 |
| 271 | SKWYIRVGARKSAPL | ORF8 | Yes | CD4 | |
| 272 | YIRVGARKSAPLIEL | ORF8 | Yes | CD4 | DQB1*03:01, DRB1*01:01, |
| | | | | | DRB1*01:03, DRB1*07:01, |
| | | | | | DRB1*11:04, DRB1*13:02, |
| | | | | | DRB1*15:01, DRB1*16:01 |
| 273 | ARKSAPLIELCVDEA | ORF8 | | CD4 | |
| 274 | PLIELCVDEAGSKSP | ORF8 | | CD4 | |
| 275 | CVDEAGSKSPIQYID | ORF8 | | CD4 | |
| 276 | IQYIDIGNYTVSCLP | ORF8 | | CD4 | DRB1*11:04, DRB1*13:02 |
| 277 | IGNYTVSCLPFTINC | ORF8 | Yes | CD4 | DQB1*03:03, DRB1*15:02 |
| 278 | FTINCQEPKLGSLVV | ORF8 | Yes | CD4 | |
| 279 | QEPKLGSLVVRCSFY | ORF8 | | CD4 | DRB1*11:04 |
| 280 | GSLVVRCSFYEDFLE | ORF8 | Yes | CD4 | DQB1*05:02, DQB1*05:03 |
| 281 | RCSFYEDFLEYHDVR | ORF8 | Yes | CD4 | DQB1*05:02 |
| 282 | EDFLEYHDVRVVLDF | ORF8 | | CD4 | DQB1*05:02, DQB1*06:04, |
| | | | | | DRB1*13:02, DRB1*15:02 |
| 283 | DFLEYHDVRVVLDFI | ORF8 | | CD4 | DQB1*05:02, DQB1*06:04, |
| | | | | | DRB1*15:02 |
| 284 | INVFAFPFTIYSLLL | ORF10 | Yes | CD4 | |
| 285 | MFVFLVLLPLVSS | S | | CD4 | |
| 286 | VLLPLVSSQCVNLTT | S | | CD4 | DRB1*07:01 |
| 287 | VSSQCVNLTTRTQLP | S | | CD4 | |
| 288 | VNLTTRTQLPPAYTN | S | | CD4 | |
| 289 | SFTRGVYYPDKVFRS | S | | CD4 | |
| 290 | VYYPDKVFRSSVLHS | S | | CD4 | DRB1*03:01, DRB1*13:01, |
| | | | | | DRB1*14:01 |
| 291 | SVLHSTQDLFLPFFS | S | Yes | CD4 | DQB1*02:02, DQB1*05:01, |
| | | | | | DRB1*07:01 |
| 292 | LPFFSNVTWFHAIHV | S | | CD4 | DQB1*05:02, DRB1*15:01, |
| | | | | | DRB1*16:01 |
| 293 | PFFSNVTWFHAIHVS | S | | CD4 | |
| 294 | NVTWFHAIHVSGTNG | S | | CD4 | |
| 295 | NPVLPFNDGVYFAST | S | | CD4 | |
| 296 | EKSNIIRGWIFGTTL | S | | CD4 | DRB1*15:01 |
| 297 | IRGWIFGTTLDSKTQ | S | | CD4 | |
| 298 | FGTTLDSKTQSLLIV | S | | CD4 | |
| 299 | DSKTQSLLIVNNATN | S | | CD4 | |
| 300 | SLLIVNNATNVVIKV | S | | CD4 | DQB1*06:03, DRB1*07:01, |
| | | | | | DRB1*12:01, DRB1*13:01, |
| | | | | | DRB1*14:01 |
| 301 | NNATNVVIKVCEFQF | S | Yes | CD4 | |
| 302 | VVIKVCEFQFCNDPF | S | | CD4 | DQB1*05:01 |
| 303 | CEFQFCNDPFLGVYY | S | Yes | CD4 | DQB1*02:02, DQB1*05:01, |
| | | | | | DQB1*05:02, DQB1*05:03 |
| 304 | LGVYYHKNNKSWMES | S | | CD4 | DRB1*13:03 |
| 305 | HKNNKSWMESEFRVY | S | | CD4 | DQB1*05:03 |
| 306 | SSANNCTFEYVSQPF | S | Yes | CD4 | |
| 307 | CTFEYVSQPFLMDLE | S | Yes | CD4 | DQB1*02:01, DQB1*02:02, |
| | | | | | DQB1*05:02, DQB1*05:03, |
| | | | | | DQB1*06:04, DRB1*07:01, |
| | | | | | DRB1*16:01 |
| 308 | VSQPFLMDLEGKQGN | S | | CD4 | DRB1*03:01 |
| 309 | LMDLEGKQGNFKNLR | S | Yes | CD4 | |
| 310 | GKQGNFKNLREFVFK | S | | CD4 | |
| 311 | EFVFKNIDGYFKIYS | S | Yes | CD4 | DQB1*05:03, DRB1*14:01, |
| | | | | | DRB1*15:01 |
| 312 | NIDGYFKIYSKHTPI | S | Yes | CD4 | DRB1*07:01, DRB1*15:01, |
| | | | | | DRB1*16:01 |
| 313 | FKIYSKHTPINLVRD | S | | CD4 | DRB1*07:01, DRB1*13:01 |
| 314 | SKHTPINLVRDLPQG | S | | CD4 | |
| 315 | KHTPINLVRDLPQGF | S | Yes | CD4 | DRB1*03:01 |
| 316 | PINLVRDLPQGFSAL | S | | CD4 | DRB1*03:01, DRB3*01:01 |
| 317 | NLVRDLPQGFSALEP | S | Yes | CD4 | DRB1*03:01 |
| 318 | LPQGFSALEPLVDLP | S | Yes | CD4 | DQB1*02:02, DQB1*03:03, |
| | | | | | DQB1*05:03 |
| 319 | SALEPLVDLPIGINI | S | | CD4 | |
| 320 | IGINITRFQTLLALH | S | Yes | CD4 | DQB1*06:03, DRB1*07:01, |
| | | | | | DRB1*11:02, DRB1*13:01, |
| | | | | | DRB1*13:03 |
| 321 | ITRFQTLLALHRSYL | S | Yes | CD4 | |
| 322 | TRFQTLLALHRSYLT | S | Yes | CD4 | DQB1*05:01, DQB1*05:03, |
| | | | | | DQB1*06:02, DQB1*06:03, |
| | | | | | DRB1*01:01, DRB1*07:01, |
| | | | | | DRB1*08:03, DRB1*11:02, |
| | | | | | DRB1*12:01, DRB1*13:01, |
| | | | | | DRB1*13:02, DRB1*13:03, |
| | | | | | DRB1*14:01, DRB1*15:01 |
| 323 | LLALHRSYLTPGDSS | S | Yes | CD4 | DRB1*01:01, DRB1*07:01, |
| | | | | | DRB1*11:02, DRB1*15:01 |
| 324 | YVGYLQPRTFLLKYN | S | | CD4 | |
| 325 | CTLKSFTVEKGIYQT | S | | CD4 | DRB1*15:01 |
| 326 | FTVEKGIYQTSNFRV | S | | CD4 | DRB1*07:01 |
| 327 | GIYQTSNFRVQPTES | S | | CD4 | DRB1*01:01, DRB1*13:03 |
| 328 | SNFRVQPTESIVRFP | S | | CD4 | DRB1*03:01, DRB1*07:01 |
| 329 | QPTESIVRFPNITNL | S | Yes | CD4 | DRB1*08:03, DRB1*15:01 |
| 330 | IVRFPNITNLCPFGE | S | Yes | CD4 | DRB1*15:01 |
| 331 | CPFGEVENATRFASV | S | Yes | CD4 | DQB1*03:01, DQB1*06:02, |
| | | | | | DQB1*06:03, DRB1*01:01, |
| | | | | | DRB1*07:01, DRB1*08:03, |
| | | | | | DRB1*11:01, DRB1*11:02, |
| | | | | | DRB1*13:01, DRB1*13:03 |
| 332 | VFNATRFASVYAWNR | S | Yes | CD4 | DQB1*03:01, DQB1*06:02, |
| | | | | | DRB1*01:01, DRB1*08:03, |
| | | | | | DRB1*11:01, DRB1*13:03, |
| | | | | | DRB1*15:01 |
| 333 | RFASVYAWNRKRISN | S | Yes | CD4 | DRB1*07:01, DRB1*11:02, |
| | | | | | DRB1*13:01, DRB1*13:03, |
| | | | | | DRB1*14:01 |
| 334 | YAWNRKRISNCVADY | S | | CD4 | DRB1*13:01 |
| 335 | KRISNCVADYSVLYN | S | | CD4 | DQB1*02:01, DQB1*02:02, |
| | | | | | DRB1*03:01 |
| 336 | CVADYSVLYNSASFS | S | | CD4 | DQB1*05:03, DQB1*06:02 |
| 337 | SVLYNSASFSTFKCY | S | | CD4 | DRB1*15:01 |
| 338 | SASFSTFKCYGVSPT | S | | CD4 | DRB1*15:01 |
| 339 | TFKCYGVSPTKLNDL | S | | CD4 | |
| 340 | GVSPTKLNDLCFTNV | S | | CD4 | |
| 341 | KLNDLCFTNVYADSF | S | | CD4 | DQB1*02:01, DQB1*02:02, |
| | | | | | DRB1*07:01 |
| 342 | YADSFVIRGDEVRQI | S | | CD4 | DQB1*02:02, DRB1*13:01 |
| 343 | VIRGDEVRQIAPGQT | S | | CD4 | DRB1*13:01 |
| 344 | GKIADYNYKLPDDFT | S | | CD4 | |
| 345 | GCVIAWNSNNLDSKV | S | Yes | CD4 | DQB1*02:02, DQB1*06:03, |
| | | | | | DRB1*07:01, DRB1*13:01 |
| 346 | WNSNNLDSKVGGNYN | S | | CD4 | |
| 347 | GGNYNYLYRLFRKSN | S | Yes | CD4 | DRB1*11:02, DRB1*13:03 |
| 348 | YNYLYRLFRKSNLKP | S | | CD4 | DPB1*02:01 |
| 349 | YLYRLFRKSNLKPFE | S | | CD4 | |
| 350 | LKPFERDISTEIYQA | S | | CD4 | |
| 351 | EIYQAGSTPCNGVEG | S | | CD4 | |
| 352 | NGVEGENCYFPLQSY | S | | CD4 | |
| 353 | FNCYFPLQSYGFQPT | S | | CD4 | DQB1*05:01, DQB1*05:03, |
| | | | | | DRB1*01:01, DRB1*12:01 |
| 354 | QPYRVVVLSFELLHA | S | Yes | CD4 | DQB1*05:03, DRB1*14:01 |
| 355 | VVLSFELLHAPATVC | S | | CD4 | DQB1*05:03, DRB1*12:01, |
| | | | | | DRB1*14:01 |
| 356 | FNFNGLTGTGVLTES | S | | CD4 | DQB1*06:02, DRB1*01:01 |
| 357 | LTGTGVLTESNKKFL | S | | CD4 | |
| 358 | TLEILDITPCSFGGV | S | | CD4 | |
| 359 | VNNSYECDIPIGAGI | S | | CD4 | |
| 360 | ECDIPIGAGICASYQ | S | | CD4 | |
| 361 | SIIAYTMSLGAENSV | S | Yes | CD4 | DQB1*02:02, DQB1*05:01, |
| | | | | | DRB1*01:03, DRB1*07:01 |
| 362 | AENSVAYSNNSIAIP | S | Yes | CD4 | DQB1*03:01, DQB1*06:02, |
| | | | | | DRB1*08:03, DRB1*15:01 |
| 363 | AYSNNSIAIPTNFTI | S | | CD4 | DQB1*03:01, DQB1*06:03 |
| 364 | SIAIPTNFTISVTTE | S | Yes | CD4 | DQB1*02:02, DQB1*06:02 |
| 365 | TNFTISVTTEILPVS | S | Yes | CD4 | DQB1*02:02, DQB1*03:01, |
| | | | | | DQB1*06:03, DRB1*01:01, |
| | | | | | DRB1*01:03, DRB1*07:01, |
| | | | | | DRB1*14:01 |
| 366 | SVTTEILPVSMTKTS | S | | CD4 | |
| 367 | STECSNLLLQYGSFC | S | Yes | CD4 | DQB1*06:02 |
| 368 | NLLLQYGSFCTQLNR | S | Yes | CD4 | DQB1*05:01, DQB1*05:03, |
| | | | | | DRB1*01:01, DRB1*04:04, |
| | | | | | DRB1*15:01 |
| 369 | YGSFCTQLNRALTGI | S | | CD4 | DQB1*03:03, DQB1*04:02, |
| | | | | | DRB1*09:01 |
| 370 | TQLNRALTGIAVEQD | S | Yes | CD4 | DQB1*03:03, DQB1*04:02, |
| | | | | | DQB1*06:02, DQB1*06:04, |
| | | | | | DRB1*01:01, DRB1*09:01 |
| 371 | KNTQEVFAQVKQIYK | S | | CD4 | |
| 372 | VFAQVKQIYKTPPIK | S | | CD4 | DRB1*15:01 |
| 373 | TPPIKDFGGFNFSQI | S | | CD4 | DRB1*15:01 |
| 374 | NFSQILPDPSKPSKR | S | Yes | CD4 | DRB1*03:01 |
| 375 | LPDPSKPSKRSFIED | S | | CD4 | |
| 376 | KPSKRSFIEDLLFNK | S | Yes | CD4 | DQB1*02:01, DQB1*02:02, |
| | | | | | DQB1*05:01, DQB1*05:03, |
| | | | | | DRB1*03:01 |
| 377 | SFIEDLLFNKVTLAD | S | Yes | CD4 | DQB1*05:01, DQB1*05:02, |
| | | | | | DQB1*05:03, DRB1*01:01, |
| | | | | | DRB1*01:03, DRB1*03:01, |
| | | | | | DRB1*04:04, DRB1*11:02, |
| | | | | | DRB1*12:01, DRB1*13:03, |
| | | | | | DRB1*14:01, DRB1*15:01, |
| | | | | | DRB1*16:02 |
| 378 | LLFNKVTLADAGFIK | S | | CD4 | DQB1*03:01, DQB1*06:02, |
| | | | | | DRB1*01:01 |
| 379 | VTLADAGFIKQYGDC | S | | CD4 | |
| 380 | AGFIKQYGDCLGDIA | S | Yes | CD4 | DQB1*05:03 |
| 381 | QYGDCLGDIAARDLI | S | | CD4 | |
| 382 | LGDIAARDLICAQKF | S | | CD4 | |
| 383 | ARDLICAQKENGLTV | S | | CD4 | |
| 384 | CAQKFNGLTVLPPLL | S | | CD4 | DQB1*05:01, DQB1*05:02, |
| | | | | | DQB1*06:02, DRB1*01:01, |
| | | | | | DRB1*15:01, DRB1*16:01 |
| 385 | FNGLTVLPPLLTDEM | S | Yes | CD4 | |
| 386 | LPPLLTDEMIAQYTS | S | | CD4 | DQB1*04:02 |
| 387 | TDEMIAQYTSALLAG | S | Yes | CD4 | DQB1*02:02, DQB1*03:02, |
| | | | | | DQB1*06:02, DRB1*04:04, |
| | | | | | DRB1*04:10, DRB1*07:01, |
| | | | | | DRB1*15:01 |
| 388 | AQYTSALLAGTITSG | S | | CD4 | DQB1*06:02 |
| 389 | ALLAGTITSGWTFGA | S | | CD4 | DQB1*06:02 |
| 390 | TITSGWTFGAGAALQ | S | | CD4 | DQB1*04:02, DQB1*06:02 |
| 391 | WTFGAGAALQIPFAM | S | | CD4 | DQB1*03:01, DRB1*01:01 |
| 392 | IPFAMQMAYRENGIG | S | Yes | CD4 | DQB1*04:02, DQB1*05:01, |
| | | | | | DQB1*05:03, DRB1*01:01, |
| | | | | | DRB1*11:01, DRB1*12:01, |
| | | | | | DRB1*14:01, DRB1*15:01 |
| 393 | QMAYRFNGIGVTQNV | S | Yes | CD4 | DQB1*03:01, DQB1*06:03, |
| | | | | | DRB1*01:01, DRB1*07:01 |
| 394 | VTQNVLYENQKLIAN | S | | CD4 | DRB1*03:01, DRB1*12:01 |
| 395 | LYENQKLIANQENSA | S | | CD4 | DRB1*12:01 |
| 396 | GKLQDVVNQNAQALN | S | | CD4 | |
| 397 | AQALNTLVKQLSSNF | S | | CD4 | DQB1*06:02, DRB1*11:01, |
| | | | | | DRB1*13:03 |
| 398 | TLVKQLSSNFGAISS | S | | CD4 | DQB1*03:01, DRB1*01:01, |
| | | | | | DRB1*11:01 |
| 399 | GAISSVLNDILSRLD | S | | CD4 | DQB1*05:01 |
| 400 | VQIDRLITGRLQSLQ | S | Yes | CD4 | DRB1*01:01, DRB1*03:01, |
| | | | | | DRB1*11:01, DRB1*13:03 |
| 401 | LITGRLQSLQTYVTQ | S | | CD4 | DQB1*06:02, DRB1*01:01, |
| | | | | | DRB1*15:01 |
| 402 | APHGVVFLHVTYVPA | S | | CD4 | DQB1*05:01, DRB1*04:04, |
| | | | | | DRB1*10:01, DRB1*12:01 |
| 403 | TTAPAICHDGKAHFP | S | | CD4 | |
| 404 | KAHFPREGVFVSNGT | S | | CD4 | |
| 405 | REGVFVSNGTHWFVT | S | | CD4 | DRB1*01:03, DRB1*07:01 |
| 406 | HWFVTQRNFYEPQII | S | | CD4 | DQB1*05:01 |
| 407 | QRNFYEPQIITTDNT | S | | CD4 | |
| 408 | FVSGNCDVVIGIVNN | S | | CD4 | |
| 409 | GIVNNTVYDPLQPEL | S | | CD4 | DQB1*02:02, DQB1*03:02 |
| 410 | LQPELDSFKEELDKY | S | | CD4 | |
| 411 | ELDKYFKNHTSPDVD | S | Yes | CD4 | |
| 412 | LGDISGINASVVNIQ | S | | CD4 | DQB1*03:01 |
| 413 | GINASVVNIQKEIDR | S | Yes | CD4 | DQB1*03:01 |
| 414 | LNEVAKNLNESLIDL | S | | CD4 | DRB1*13:02 |
| 415 | QELGKYEQYIKWPWY | S | | CD4 | |
| 416 | YEQYIKWPWYIWLGF | S | | CD4 | |
| 417 | SEETGTLIV | E | | CD8 | |
| 418 | FLAFVVFL | E | | CD8 | A*02:01 |
| 419 | FLLVTLAIL | E | | CD8 | A*02:01 |
| 420 | SLVKPSFYV | E | Yes | CD8 | |
| 421 | LVKPSFYVY | E | | CD8 | C*07:02 |
| 422 | FYVYSRVKNL | E | | CD8 | A*24:02 |
| 423 | YVYSRVKNL | E | Yes | CD8 | C*06:02 |
| 424 | NGTITVEELK | M | | CD8 | A*68:01 |
| 425 | GTITVEELK | M | Yes | CD8 | A*68:01 |
| 426 | KLLEQWNLV | M | Yes | CD8 | A*02:01 |
| 427 | FLFLTWICL | M | Yes | CD8 | A*02:01 |
| 428 | WICLLQFAY | M | | CD8 | |
| 429 | LQFAYANRNRFLY | M | Yes | CD8 | |
| 430 | FAYANRNRF | M | | CD8 | B*15:01, B*35:01 |
| 431 | AYANRNRF | M | | CD8 | A*24:02 |
| 432 | AYANRNRFL | M | | CD8 | A*24:02 |
| 433 | YANRNRFLY | M | | CD8 | A*01:01, B*35:01 |
| 434 | ANRNRFLYI | M | | CD8 | B*08:01 |
| 435 | RNRFLYIIK | M | | CD8 | A*30:01 |
| 436 | RNRFLYIIKL | M | | CD8 | C*07:01 |
| 437 | NRFLYIIKL | M | Yes | CD8 | B*08:01, C*07:02 |
| 438 | RFLYIIKLIF | M | | CD8 | A*24:02 |
| 439 | FLWLLWPVTL | M | | CD8 | A*02:01 |
| 440 | WLLWPVTLA | M | | CD8 | A*02:01 |
| 441 | LLWPVTLAC | M | | CD8 | A*02:01 |
| 442 | TLACFVLAAV | M | Yes | CD8 | A*02:01 |
| 443 | FVLAAVYRI | M | Yes | CD8 | A*02:01, A*68:02 |
| 444 | LAAVYRINW | M | | CD8 | B*57:01 |
| 445 | LAAVYRINWI | M | | CD8 | |
| 446 | AAVYRINW | M | | CD8 | B*57:01 |
| 447 | AIAMACLVGLM | M | | CD8 | |
| 448 | MACLVGLMW | M | | CD8 | B*57:01 |
| 449 | GLMWLSYFI | M | | CD8 | A*02:01 |
| 450 | LSYFIASFR | M | | CD8 | A*31:01, A*68:01 |
| 451 | SYFIASFRLFA | M | Yes | CD8 | |
| 452 | IASFRLFAR | M | | CD8 | A*33:01 |
| 453 | FRLFARTRSM | M | | CD8 | B*08:01 |
| 454 | RLFARTRSM | M | | CD8 | A*30:01 |
| 455 | RLFARTRSMW | M | Yes | CD8 | |
| 456 | RTRSMWSF | M | | CD8 | B*57:01 |
| 457 | SMWSFNPET | M | Yes | CD8 | A*02:01 |
| 458 | SMWSFNPETNIL | M | | CD8 | |
| 459 | SFNPETNIL | M | | CD8 | B*08:01 |
| 460 | VPLHGTIL | M | | CD8 | B*07:02 |
| 461 | RPLLESEL | M | | CD8 | B*07:02 |
| 462 | SELVIGAVI | M | | CD8 | B*44:02 |
| 463 | SELVIGAVIL | M | Yes | CD8 | B*40:01 |
| 464 | ELVIGAVILR | M | | CD8 | A*68:01 |
| 465 | LVIGAVILR | M | | CD8 | A*68:01 |
| 466 | AVILRGHLR | M | Yes | CD8 | A*68:01 |
| 467 | HLRIAGHHLGR | M | Yes | CD8 | |
| 468 | HLRIAGHHL | M | | CD8 | B*08:01 |
| 469 | RIAGHHLGR | M | | CD8 | A*03:01 |
| 470 | LPKEITVAT | M | | CD8 | B*07:02 |
| 471 | TVATSRTLSYYK | M | Yes | CD8 | |
| 472 | TVATSRTLSY | M | | CD8 | A*01:01 |
| 473 | VATSRTLSYY | M | | CD8 | A*01:01 |
| 474 | VATSRTLSY | M | | CD8 | A*01:01, B*35:01 |
| 475 | ATSRTLSYYK | M | Yes | CD8 | A*11:01, A*30:01 |
| 476 | ATSRTLSYY | M | Yes | CD8 | A*01:01, A*11:01, B*57:01 |
| 477 | ASQRVAGDSGFAAY | M | Yes | CD8 | |
| 478 | SQRVAGDSGF | M | | CD8 | B*15:01 |
| 479 | RVAGDSGFAAYSRY | M | | CD8 | A*30:02 |
| 480 | RVAGDSGFAAY | M | | CD8 | A*01:01, B*15:01 |
| 481 | AGDSGFAAY | M | | CD8 | A*01:01 |
| 482 | DSGFAAYSR | M | | CD8 | A*68:01 |
| 483 | YSRYRIGNYK | M | | CD8 | A*30:01 |
| 484 | RYRIGNYKL | M | Yes | CD8 | A*24:02, A*30:01 |
| 485 | SSSDNIALL | M | | CD8 | A*68:02 |
| 486 | GPQNQRNAPRITF | N | | CD8 | B*07:02 |
| 487 | QRNAPRITF | N | Yes | CD8 | B*27:05, C*07:01, C*07:02 |
| 488 | RPQGLPNNTA | N | | CD8 | B*07:02 |
| 489 | QGLPNNTASW | N | | CD8 | B*57:01 |
| 490 | LPNNTASWF | N | | CD8 | B*07:02 |
| 491 | NTASWFTAL | N | Yes | CD8 | A*02:01 |
| 492 | KFPRGQGVPI | N | Yes | CD8 | |
| 493 | FPRGQGVPI | N | Yes | CD8 | B*07:02, B*08:01 |
| 494 | NTNSSPDDQIGYY | N | Yes | CD8 | A*01:01 |
| 495 | SSPDDQIGYYR | N | | CD8 | A*01:01 |
| 496 | SPDDQIGYY | N | | CD8 | B*35:01 |
| 497 | YYRRATRRIR | N | Yes | CD8 | |
| 498 | RIRGGDGKMK | N | Yes | CD8 | |
| 499 | KMKDLSPRW | N | Yes | CD8 | B*57:01 |
| 500 | MKDLSPRWY | N | | CD8 | C*07:01 |
| 501 | LSPRWYFYYL | N | Yes | CD8 | |
| 502 | SPRWYFYYL | N | Yes | CD8 | B*07:02, B*08:01 |
| 503 | YLGTGPEAGL | N | | CD8 | A*02:01 |
| 504 | GTGPEAGLPY | N | Yes | CD8 | |
| 505 | AGLPYGANK | N | | CD8 | A*30:01 |
| 506 | LPYGANKDGI | N | | CD8 | B*51:01 |
| 507 | YGANKDGIIW | N | | CD8 | B*57:01 |
| 508 | IIWVATEGA | N | | CD8 | A*02:01 |
| 509 | ATEGALNTPK | N | Yes | CD8 | A*11:01 |
| 510 | ATEGALNTPKDHI | N | Yes | CD8 | |
| 511 | GTRNPANNA | N | | CD8 | A*30:01 |
| 512 | RNPANNAAIVL | N | Yes | CD8 | |
| 513 | NPANNAAIVL | N | Yes | CD8 | B*07:02 |
| 514 | VLQLPQGTTL | N | Yes | CD8 | A*02:01 |
| 515 | AEGSRGGSQA | N | | CD8 | |
| 516 | SQASSRSSSR | N | | CD8 | |
| 517 | SSRGTSPAR | N | | CD8 | |
| 518 | LALLLLDRL | N | Yes | CD8 | A*02:01 |
| 519 | LLLLDRLNQL | N | Yes | CD8 | A*02:01 |
| 520 | LLLDRLNQL | N | Yes | CD8 | A*02:01 |
| 521 | QQQQGQTVTK | N | Yes | CD8 | |
| 522 | KSAAEASKK | N | | CD8 | A*11:01 |
| 523 | KPRQKRTAT | N | Yes | CD8 | B*07:02, B*08:01 |
| 524 | RTATKAYNV | N | | CD8 | A*02:01 |
| 525 | KAYNVTQAF | N | Yes | CD8 | B*35:01, B*57:01 |
| 526 | RRGPEQTQGNF | N | | CD8 | C*07:01 |
| 527 | QELIRQGTDY | N | | CD8 | B*44:02 |
| 528 | QELIRQGTDYKHW | N | Yes | CD8 | |
| 529 | ELIRQGTDY | N | | CD8 | A*26:01 |
| 530 | DYKHWPQIAQF | N | | CD8 | A*24:02 |
| 531 | HWPQIAQF | N | | CD8 | A*24:02 |
| 532 | AQFAPSASA | N | Yes | CD8 | A*02:01 |
| 533 | AQFAPSASAF | N | Yes | CD8 | A*24:02, B*15:01 |
| 534 | QFAPSASAFF | N | | CD8 | A*24:02 |
| 535 | FAPSASAFF | N | | CD8 | B*35:01 |
| 536 | APSASAFFGM | N | | CD8 | B*07:02 |
| 537 | SASAFFGMSR | N | | CD8 | A*68:01 |
| 538 | ASAFFGMSR | N | Yes | CD8 | A*11:01, A*68:01 |
| 539 | GMSRIGMEV | N | Yes | CD8 | A*02:01 |
| 540 | GMEVTPSGTWLTY | N | Yes | CD8 | |
| 541 | MEVTPSGTW | N | Yes | CD8 | B*44:03 |
| 542 | MEVTPSGTWL | N | Yes | CD8 | B*40:01 |
| 543 | EVTPSGTWLTY | N | | CD8 | A*26:01 |
| 544 | VTPSGTWLTY | N | | CD8 | A*30:02 |
| 545 | TPSGTWLTY | N | | CD8 | B*35:01 |
| 546 | KLDDKDPNF | N | | CD8 | A*02:01 |
| 547 | ILLNKHIDA | N | Yes | CD8 | A*02:01 |
| 548 | LLNKHIDAY | N | | CD8 | B*15:01 |
| 549 | AYKTFPPTEPK | N | Yes | CD8 | |
| 550 | YKTFPPTEPK | N | | CD8 | A*68:01 |
| 551 | KTFPPTEPKK | N | Yes | CD8 | A*03:01, A*11:01 |
| 552 | KTFPPTEPK | N | Yes | CD8 | A*03:01, A*11:01, A*68:01 |
| 553 | KTFPPTEPKKDKKK | N | | CD8 | A*03:01 |
| 554 | KKQQTVTLL | N | | CD8 | C*07:01 |
| 555 | LPAADLDDF | N | Yes | CD8 | B*35:01 |
| 556 | AADLDDFSKQL | N | | CD8 | A*02:01 |
| 557 | FSKQLQQSM | N | Yes | CD8 | |
| 558 | VLSEARQHL | NSP1 | Yes | CD8 | A*02:01 |
| 559 | HLKDGTCGL | NSP1 | | CD8 | B*08:01 |
| 560 | APHGHVMVEL | NSP1 | | CD8 | B*07:02 |
| 561 | VMVELVAEL | NSP1 | | CD8 | A*02:01 |
| 562 | VPHVGEIPV | NSP1 | | CD8 | B*07:02 |
| 563 | HVGEIPVAY | NSP1 | | CD8 | B*15:01 |
| 564 | IPVAYRKVLL | NSP1 | | CD8 | B*07:02 |
| 565 | TFNGECPNF | NSP2 | | CD8 | A*24:02 |
| 566 | KTIQPRVEK | NSP2 | Yes | CD8 | A*03:01, A*11:01 |
| 567 | GFMGRIRSV | NSP2 | | CD8 | C*06:02 |
| 568 | SEVGPEHSLAEY | NSP2 | Yes | CD8 | |
| 569 | EEIAIILASF | NSP2 | | CD8 | B*44:03 |
| 570 | AIILASFSAST | NSP2 | | CD8 | |
| 571 | ILSPLYAFA | NSP2 | | CD8 | A*02:01 |
| 572 | VRSIFSRTL | NSP2 | | CD8 | C*06:02 |
| 573 | ITILDGISQY | NSP2 | | CD8 | B*15:01 |
| 574 | RLIDAMMFT | NSP2 | | CD8 | A*02:01 |
| 575 | TSDLATNNLVVMAY | NSP2 | Yes | CD8 | |
| 576 | TVYEKLKPV | NSP2 | | CD8 | A*02:01 |
| 577 | YEKLKPVL | NSP2 | | CD8 | B*08:01 |
| 578 | EIKESVQTF | NSP2 | | CD8 | B*15:01 |
| 579 | KLVNKFLAL | NSP2 | Yes | CD8 | A*02:01 |
| 580 | APKEIIFLEGETL | NSP2 | Yes | CD8 | |
| 581 | APKEIIFL | NSP2 | | CD8 | B*07:02 |
| 582 | GETLPTEVL | NSP2 | | CD8 | B*40:01 |
| 583 | VTNNTFTLK | NSP2 | Yes | CD8 | A*03:01, A*11:01 |
| 584 | FGDDTVIEV | NSP3 | Yes | CD8 | A*02:01 |
| 585 | DTVIEVQGYK | NSP3 | | CD8 | A*68:01 |
| 586 | QGYKSVNITF | NSP3 | | CD8 | A*24:02 |
| 587 | FELDERIDKV | NSP3 | | CD8 | A*02:01 |
| 588 | FELDERIDKVL | NSP3 | | CD8 | B*40:01 |
| 589 | ELDERIDKV | NSP3 | | CD8 | A*02:01 |
| 590 | VLNEKCSAY | NSP3 | | CD8 | B*15:01 |
| 591 | VELGTEVNEF | NSP3 | | CD8 | B*44:02 |
| 592 | SELLTPLGI | NSP3 | | CD8 | B*40:01 |
| 593 | YLFDESGEF | NSP3 | | CD8 | B*15:01 |
| 594 | YLFDESGEFKL | NSP3 | Yes | CD8 | A*02:01 |
| 595 | FEPSTQYEY | NSP3 | | CD8 | B*44:02 |
| 596 | DDYQGKPLEF | NSP3 | | CD8 | A*24:02 |
| 597 | KPLEFGATSAAL | NSP3 | | CD8 | |
| 598 | LEFGATSAAL | NSP3 | | CD8 | B*40:01 |
| 599 | VEVQPQLEM | NSP3 | | CD8 | B*40:01 |
| 600 | LEMELTPVV | NSP3 | | CD8 | B*40:01 |
| 601 | MELTPVVQTI | NSP3 | | CD8 | B*40:01 |
| 602 | TPVVQTIEV | NSP3 | | CD8 | B*07:02 |
| 603 | TIEVNSFSGY | NSP3 | | CD8 | A*01:01 |
| 604 | IEVNSFSGY | NSP3 | | CD8 | B*44:02 |
| 605 | NSFSGYLKL | NSP3 | | CD8 | C*06:02 |
| 606 | YLKLTDNVY | NSP3 | | CD8 | B*15:01 |
| 607 | YLKLTDNVYIK | NSP3 | | CD8 | |
| 608 | EAKKVKPTV | NSP3 | | CD8 | B*51:01 |
| 609 | VVVNAANVY | NSP3 | | CD8 | B*35:01 |
| 610 | YIATNGPLK | NSP3 | | CD8 | A*11:01 |
| 611 | YENFNQHEV | NSP3 | | CD8 | B*40:01 |
| 612 | LLSAGIFGA | NSP3 | | CD8 | |
| 613 | GADPIHSLR | NSP3 | | CD8 | A*68:01 |
| 614 | RTNVYLAVF | NSP3 | | CD8 | B*57:01 |
| 615 | AVFDKNLYDK | NSP3 | | CD8 | A*03:01, A*11:01 |
| 616 | NLYDKLVSSFL | NSP3 | | CD8 | A*02:01 |
| 617 | LYDKLVSSF | NSP3 | | CD8 | A*24:02 |
| 618 | KLVSSFLEM | NSP3 | | CD8 | B*15:01 |
| 619 | KIAEIPKEEV | NSP3 | | CD8 | A*02:01 |
| 620 | EVKPFITESK | NSP3 | | CD8 | A*68:01 |
| 621 | ESKPSVEQR | NSP3 | | CD8 | A*68:01 |
| 622 | FLTENLLLYI | NSP3 | | CD8 | A*02:01 |
| 623 | LVSDIDITF | NSP3 | | CD8 | B*35:01 |
| 624 | APYIVGDVV | NSP3 | | CD8 | B*51:01 |
| 625 | LTAVVIPTK | NSP3 | | CD8 | A*68:01 |
| 626 | ALRKVPTDNY | NSP3 | | CD8 | B*15:01 |
| 627 | ALRKVPTDNYITTY | NSP3 | Yes | CD8 | |
| 628 | PTDNYITTY | NSP3 | Yes | CD8 | A*01:01 |
| 629 | TDNYITTY | NSP3 | Yes | CD8 | A*01:01 |
| 630 | TTYPGQGLNGY | NSP3 | | CD8 | A*01:01 |
| 631 | KQEILGTVSW | NSP3 | | CD8 | B*44:02, B*44:03 |
| 632 | QEILGTVSW | NSP3 | Yes | CD8 | B*44:03 |
| 633 | MLAHAEETR | NSP3 | | CD8 | A*68:01 |
| 634 | AHAEETRKL | NSP3 | | CD8 | C*06:02 |
| 635 | KLMPVCVET | NSP3 | | CD8 | A*02:01 |
| 636 | AIVSTIQRKYK | NSP3 | | CD8 | A*03:01 |
| 637 | AIVSTIQRK | NSP3 | | CD8 | A*03:01 |
| 638 | VVDYGARFY | NSP3 | | CD8 | A*01:01 |
| 639 | SLINTLNDL | NSP3 | | CD8 | A*02:01 |
| 640 | VSSPDAVTAY | NSP3 | | CD8 | A*01:01, B*57:01 |
| 641 | TISLAGSYK | NSP3 | | CD8 | A*03:01, A*11:01, A*68:01 |
| 642 | ISLAGSYKDW | NSP3 | | CD8 | B*57:01 |
| 643 | SVYYTSNPTTF | NSP3 | | CD8 | A*24:02 |
| 644 | YYTSNPTTF | NSP3 | | CD8 | A*24:02 |
| 645 | YYTSNPTTFHL | NSP3 | | CD8 | A*24:02 |
| 646 | TSNPTTFHL | NSP3 | | CD8 | B*57:01 |
| 647 | HLDGEVITF | NSP3 | | CD8 | C*07:02 |
| 648 | GEVITFDNL | NSP3 | | CD8 | B*40:01 |
| 649 | ITFDNLKTL | NSP3 | | CD8 | B*57:01 |
| 650 | NLKTLLSL | NSP3 | | CD8 | B*08:01 |
| 651 | RTIKVFTTV | NSP3 | | CD8 | A*02:01 |
| 652 | NINLHTQVV | NSP3 | | CD8 | B*08:01 |
| 653 | HTQVVDMSMTY | NSP3 | | CD8 | A*01:01 |
| 654 | QVVDMSMTY | NSP3 | | CD8 | A*01:01, A*11:01 |
| 655 | MSMTYGQQF | NSP3 | | CD8 | B*57:01 |
| 656 | KPHNSHEGKTF | NSP3 | | CD8 | B*07:02 |
| 657 | LRVEAFEYY | NSP3 | | CD8 | C*07:01 |
| 658 | FEYYHTTDPSF | NSP3 | | CD8 | A*24:02 |
| 659 | HTTDPSFLGR | NSP3 | | CD8 | A*68:01 |
| 660 | HTTDPSFLGRY | NSP3 | Yes | CD8 | A*01:01 |
| 661 | TTDPSFLGRY | NSP3 | Yes | CD8 | A*01:01 |
| 662 | TTDPSFLGRYM | NSP3 | Yes | CD8 | A*01:01 |
| 663 | FLGRYMSAL | NSP3 | | CD8 | |
| 664 | YMSALNHTK | NSP3 | | CD8 | A*03:01 |
| 665 | MSALNHTKK | NSP3 | | CD8 | A*30:01 |
| 666 | MSALNHTKKW | NSP3 | | CD8 | B*57:01 |
| 667 | SALNHTKKW | NSP3 | | CD8 | B*57:01 |
| 668 | WKYPQVNGL | NSP3 | | CD8 | C*07:01 |
| 669 | YPQVNGLTSI | NSP3 | | CD8 | B*51:01 |
| 670 | YLATALLTL | NSP3 | Yes | CD8 | A*02:01 |
| 671 | YYRARAGEAANF | NSP3 | Yes | CD8 | |
| 672 | ARAGEAANF | NSP3 | | CD8 | C*07:01 |
| 673 | GEAANFCAL | NSP3 | | CD8 | B*40:01 |
| 674 | GELGDVRETMSYLF | NSP3 | | CD8 | B*44:02 |
| 675 | LGDVRETMSY | NSP3 | | CD8 | A*01:01 |
| 676 | VRETMSYLF | NSP3 | | CD8 | C*07:01 |
| 677 | VMYMGTLSY | NSP3 | | CD8 | A*03:01 |
| 678 | SAPPAQYEL | NSP3 | Yes | CD8 | C*07:01 |
| 679 | FTCASEYTGNY | NSP3 | | CD8 | A*01:01 |
| 680 | SEYTGNYQCGHY | NSP3 | | CD8 | B*44:02 |
| 681 | YTGNYQCGHY | NSP3 | | CD8 | A*01:01 |
| 682 | SEYKGPITDVFY | NSP3 | | CD8 | B*44:02 |
| 683 | ITDVFYKENSY | NSP3 | Yes | CD8 | A*01:01 |
| 684 | DVFYKENSY | NSP3 | | CD8 | A*26:01 |
| 685 | KENSYTTTIKPVTY | NSP3 | | CD8 | B*44:02 |
| 686 | YTTTIKPVTY | NSP3 | | CD8 | A*01:01, A*26:01 |
| 687 | CTEIDPKLDNY | NSP3 | Yes | CD8 | A*01:01 |
| 688 | TEIDPKLDNYY | NSP3 | | CD8 | A*01:01, B*44:02 |
| 689 | EIDPKLDNY | NSP3 | | CD8 | A*01:01, A*26:01 |
| 690 | NYYKKDNSY | NSP3 | | CD8 | C*07:02 |
| 691 | YYKKDNSY | NSP3 | | CD8 | C*07:02 |
| 692 | YYKKDNSYF | NSP3 | | CD8 | A*24:02 |
| 693 | FTEQPIDLVPNQPY | NSP3 | Yes | CD8 | |
| 694 | ASFDNFKFV | NSP3 | | CD8 | A*02:06, C*06:02 |
| 695 | KFADDLNQL | NSP3 | | CD8 | C*07:02 |
| 696 | FADDLNQLTGY | NSP3 | Yes | CD8 | A*01:01 |
| 697 | ASRELKVTF | NSP3 | | CD8 | A*30:01, B*57:01 |
| 698 | DVVAIDYKHY | NSP3 | | CD8 | A*26:01 |
| 699 | VVAIDYKHY | NSP3 | | CD8 | B*15:01 |
| 700 | DYKHYTPSF | NSP3 | | CD8 | A*24:02 |
| 701 | KLLHKPIVWHV | NSP3 | | CD8 | A*02:01 |
| 702 | LHKPIVWHV | NSP3 | | CD8 | C*06:02 |
| 703 | NKATYKPNTW | NSP3 | | CD8 | B*57:01 |
| 704 | KPVETSNSFDVL | NSP3 | | CD8 | B*07:02 |
| 705 | SEDAQGMDNL | NSP3 | | CD8 | B*40:01 |
| 706 | EEVVENPTI | NSP3 | | CD8 | B*44:03 |
| 707 | TEVVGDIIL | NSP3 | | CD8 | B*40:01 |
| 708 | ITEEVGHTDLMAAY | NSP3 | | CD8 | A*01:01 |
| 709 | EEVGHTDLMAAY | NSP3 | | CD8 | B*44:03 |
| 710 | EVGHTDLMAAY | NSP3 | | CD8 | A*26:01 |
| 711 | AYVDNSSLTI | NSP3 | | CD8 | A*24:02 |
| 712 | LTIKKPNEL | NSP3 | | CD8 | B*08:01 |
| 713 | KPNELSRVL | NSP3 | | CD8 | B*07:02, B*08:01 |
| 714 | NELSRVLGL | NSP3 | | CD8 | B*40:01, B*44:02 |
| 715 | SRVLGLKTL | NSP3 | | CD8 | C*07:01 |
| 716 | SVPWDTIANY | NSP3 | | CD8 | A*26:01 |
| 717 | DTIANYAKPF | NSP3 | | CD8 | A*26:01 |
| 718 | YAKPFLNKV | NSP3 | | CD8 | C*06:02 |
| 719 | NYMPYFFTL | NSP3 | Yes | CD8 | A*24:02 |
| 720 | MPYFFTLL | NSP3 | | CD8 | B*51:01 |
| 721 | RIKASMPTT | NSP3 | | CD8 | A*30:01 |
| 722 | KASMPTTIA | NSP3 | | CD8 | A*30:01 |
| 723 | ASMPTTIAK | NSP3 | Yes | CD8 | A*11:01, A*30:01 |
| 724 | MPTTIAKNTV | NSP3 | | CD8 | B*51:01 |
| 725 | TTIAKNTVK | NSP3 | | CD8 | A*30:01 |
| 726 | NTVKSVGKF | NSP3 | | CD8 | A*26:01 |
| 727 | KFCLEASFNY | NSP3 | | CD8 | A*29:02 |
| 728 | CLEASFNYL | NSP3 | | CD8 | A*02:01 |
| 729 | ASFNYLKSPNFSK | NSP3 | | CD8 | |
| 730 | KLINIIIWF | NSP3 | | CD8 | A*32:01 |
| 731 | SLIYSTAAL | NSP3 | | CD8 | A*02:01 |
| 732 | STAALGVLM | NSP3 | | CD8 | A*26:01 |
| 733 | MSNLGMPSY | NSP3 | | CD8 | B*15:01, B*57:01 |
| 734 | EGYLNSTNV | NSP3 | | CD8 | B*51:01 |
| 735 | NSTNVTIATY | NSP3 | | CD8 | A*26:01 |
| 736 | STNVTIATY | NSP3 | | CD8 | A*01:01, A*32:01 |
| 737 | SLDTYPSLETI | NSP3 | Yes | CD8 | A*02:01 |
| 738 | ETIQITISSF | NSP3 | | CD8 | A*26:01 |
| 739 | IQITISSFK | NSP3 | | CD8 | A*03:01 |
| 740 | LTAFGLVAEW | NSP3 | | CD8 | B*57:01 |
| 741 | LVAEWFLAY | NSP3 | | CD8 | A*26:01, A*29:02 |
| 742 | AEWFLAYIL | NSP3 | | CD8 | B*40:01, B*44:02 |
| 743 | AEWFLAYILF | NSP3 | | CD8 | B*44:02 |
| 744 | AYILFTRF | NSP3 | | CD8 | A*24:02 |
| 745 | AYILFTRFFYV | NSP3 | Yes | CD8 | |
| 746 | AYILFTRFF | NSP3 | | CD8 | A*24:02 |
| 747 | ILFTRFFYV | NSP3 | Yes | CD8 | A*02:01 |
| 748 | AVHFISNSW | NSP3 | | CD8 | B*57:01 |
| 749 | HFISNSWLMW | NSP3 | | CD8 | A*24:02 |
| 750 | WLMWLIINL | NSP3 | | CD8 | A*02:01 |
| 751 | LVQMAPISAM | NSP3 | | CD8 | B*15:01 |
| 752 | SAMVRMYIF | NSP3 | | CD8 | B*08:01 |
| 753 | RMYIFFASFY | NSP3 | | CD8 | A*03:01 |
| 754 | YIFFASFYY | NSP3 | Yes | CD8 | A*29:02 |
| 755 | SFYYVWKSY | NSP3 | | CD8 | A*29:02 |
| 756 | FYYVWKSYV | NSP3 | | CD8 | C*06:02, C*07:02 |
| 757 | FYYVWKSY | NSP3 | | CD8 | C*07:02 |
| 758 | YVYANGGKGF | NSP3 | | CD8 | A*26:01, B*15:01 |
| 759 | DTFCAGSTF | NSP3 | | CD8 | A*26:01 |
| 760 | EVARDLSLQF | NSP3 | | CD8 | A*26:01 |
| 761 | VARDLSLQF | NSP3 | | CD8 | B*57:01 |
| 762 | VTVKNGSIHLY | NSP3 | | CD8 | A*01:01 |
| 763 | TVKNGSIHLY | NSP3 | | CD8 | A*26:01 |
| 764 | VKNGSIHLY | NSP3 | | CD8 | C*06:02 |
| 765 | YFDKAGQKTY | NSP3 | | CD8 | C*07:02 |
| 766 | TYERHSLSHF | NSP3 | | CD8 | A*24:02 |
| 767 | YERHSLSHF | NSP3 | | CD8 | B*44:02 |
| 768 | ERHSLSHFV | NSP3 | | CD8 | C*06:02 |
| 769 | EESSAKSASVY | NSP3 | | CD8 | B*44:02 |
| 770 | SSAKSASVY | NSP3 | | CD8 | B*15:01 |
| 771 | SAKSASVYY | NSP3 | | CD8 | B*57:01 |
| 772 | QLMCQPILLL | NSP3 | Yes | CD8 | |
| 773 | DSAEVAVKM | NSP3 | | CD8 | A*26:01 |
| 774 | AEVAVKMF | NSP3 | | CD8 | B*44:02 |
| 775 | EVAVKMFDAY | NSP3 | | CD8 | A*26:01 |
| 776 | KMFDAYVNTF | NSP3 | | CD8 | A*24:02 |
| 777 | MFDAYVNTF | NSP3 | | CD8 | B*08:01 |
| 778 | AYVNTFSSTF | NSP3 | | CD8 | A*24:02 |
| 779 | YVNTFSSTF | NSP3 | | CD8 | A*26:01 |
| 780 | SSTFNVPMEKLK | NSP3 | Yes | CD8 | |
| 781 | STFNVPMEK | NSP3 | Yes | CD8 | A*11:01 |
| 782 | VPMEKLKTL | NSP3 | | CD8 | B*51:01 |
| 783 | AEAELAKNV | NSP3 | | CD8 | B*44:02, B*44:03 |
| 784 | AELAKNVSL | NSP3 | | CD8 | B*44:02 |
| 785 | AELAKNVSLDNVL | NSP3 | | CD8 | |
| 786 | SLDNVLSTF | NSP3 | | CD8 | A*32:01 |
| 787 | TFISAARQGF | NSP3 | | CD8 | A*24:02 |
| 788 | QSDIEVTGDSCNNY | NSP3 | | CD8 | A*01:01 |
| 789 | EVTGDSCNNYMLTY | NSP3 | | CD8 | A*26:01 |
| 790 | DSCNNYMLTY | NSP3 | | CD8 | A*01:01 |
| 791 | VENMTPRDL | NSP3 | | CD8 | B*44:03 |
| 792 | TPRDLGACI | NSP3 | | CD8 | B*07:02 |
| 793 | VAKSHNIAL | NSP3 | | CD8 | B*07:02 |
| 794 | AKSHNIALIW | NSP3 | | CD8 | B*57:01 |
| 795 | NVKDFMSL | NSP3 | | CD8 | B*08:01 |
| 796 | QVVNVVTTK | NSP3 | | CD8 | A*03:01 |
| 797 | VVTTKIALK | NSP3 | | CD8 | A*03:01 |
| 798 | KQLIKVTLVF | NSP4 | | CD8 | B*15:01 |
| 799 | FYLITPVHV | NSP4 | | CD8 | C*07:02 |
| 800 | YLITPVHV | NSP4 | | CD8 | A*02:01 |
| 801 | YLITPVHVM | NSP4 | | CD8 | A*02:01, B*15:01, C*07:01 |
| 802 | HTDFSSEIIGY | NSP4 | | CD8 | |
| 803 | SEIIGYKAI | NSP4 | | CD8 | B*40:01 |
| 804 | IAAVITREV | NSP4 | | CD8 | B*51:01 |
| 805 | FVVPGLPGT | NSP4 | | CD8 | A*02:06 |
| 806 | VPGLPGTIL | NSP4 | | CD8 | B*07:02 |
| 807 | RTTNGDFLHF | NSP4 | | CD8 | B*57:01 |
| 808 | FLPRVFSAV | NSP4 | Yes | CD8 | A*02:01 |
| 809 | LPRVFSAV | NSP4 | | CD8 | B*51:01 |
| 810 | FSAVGNICY | NSP4 | Yes | CD8 | A*01:01 |
| 811 | TPSKLIEY | NSP4 | | CD8 | B*35:01 |
| 812 | VLAAECTIF | NSP4 | | CD8 | B*15:01 |
| 813 | DASGKPVPY | NSP4 | | CD8 | B*35:01 |
| 814 | TNVLEGSVAY | NSP4 | | CD8 | B*35:01 |
| 815 | GSVAYESLR | NSP4 | | CD8 | A*31:01 |
| 816 | SLRPDTRYVL | NSP4 | Yes | CD8 | C*07:02 |
| 817 | LRPDTRYV | NSP4 | | CD8 | C*06:02 |
| 818 | RPDTRYVL | NSP4 | Yes | CD8 | B*07:02 |
| 819 | RPDTRYVLM | NSP4 | | CD8 | B*07:02, B*35:01 |
| 820 | SIIQFPNTY | NSP4 | | CD8 | B*35:01 |
| 821 | WVLNNDYYR | NSP4 | | CD8 | A*31:01 |
| 822 | YRSLPGVF | NSP4 | | CD8 | C*07:01 |
| 823 | SLPGVFCGV | NSP4 | | CD8 | A*02:01 |
| 824 | DAVNLLTNM | NSP4 | | CD8 | B*51:01 |
| 825 | IVAGGIVAI | NSP4 | | CD8 | A*02:01 |
| 826 | LAYYFMRFR | NSP4 | | CD8 | A*31:01 |
| 827 | YFMRFRRAF | NSP4 | | CD8 | A*24:02 |
| 828 | FGEYSHVVAF | NSP4 | | CD8 | B*40:01 |
| 829 | SFLPGVYSV | NSP4 | | CD8 | A*24:02 |
| 830 | FLPGVYSV | NSP4 | | CD8 | A*02:01 |
| 831 | LPGVYSVI | NSP4 | | CD8 | B*51:01 |
| 832 | IYLYLTFYL | NSP4 | | CD8 | A*24:02 |
| 833 | TFYLTNDVSFL | NSP4 | Yes | CD8 | |
| 834 | YLTNDVSFLA | NSP4 | | CD8 | A*02:01 |
| 835 | FLAHIQWMV | NSP4 | | CD8 | A*02:01, A*02:06 |
| 836 | MFTPLVPFW | NSP4 | | CD8 | A*24:02 |
| 837 | VPFWITIAY | NSP4 | | CD8 | B*35:01 |
| 838 | ISTKHFYW | NSP4 | | CD8 | B*57:01 |
| 839 | WFFSNYLKR | NSP4 | | CD8 | A*31:01 |
| 840 | YLKRRVVF | NSP4 | | CD8 | B*08:01 |
| 841 | FLLNKEMYL | NSP4 | Yes | CD8 | A*02:01 |
| 842 | DVLLPLTQY | NSP4 | | CD8 | B*35:01 |
| 843 | LPLTQYNRY | NSP4 | | CD8 | B*35:01 |
| 844 | GAMDTTSYR | NSP4 | | CD8 | A*31:01 |
| 845 | SNSGSDVLY | NSP4 | | CD8 | A*01:01 |
| 846 | LYQPPQTSI | NSP4 | | CD8 | A*24:02, C*07:01 |
| 847 | AVLQSGFRK | NSP5 | | CD8 | |
| 848 | TSEDMLNPNY | NSP5 | Yes | CD8 | A*01:01 |
| 849 | TANPKTPKY | NSP5 | | CD8 | C*07:01 |
| 850 | NPKTPKYKF | NSP5 | | CD8 | B*07:02 |
| 851 | TPKYKFVRI | NSP5 | Yes | CD8 | B*08:01 |
| 852 | VRIQPGQTF | NSP5 | Yes | CD8 | C*07:01 |
| 853 | IQPGQTFSV | NSP5 | | CD8 | |
| 854 | QPGQTFSVL | NSP5 | | CD8 | B*07:02 |
| 855 | SPSGVYQCAM | NSP5 | | CD8 | B*07:02 |
| 856 | FLNGSCGSV | NSP5 | Yes | CD8 | |
| 857 | YMHHMELPTGV | NSP5 | | CD8 | A*02:01 |
| 858 | GTDLEGNFY | NSP5 | Yes | CD8 | A*01:01 |
| 859 | TDLEGNFY | NSP5 | | CD8 | A*01:01 |
| 860 | VLAWLYAAV | NSP5 | Yes | CD8 | |
| 861 | FLNRFTTTL | NSP5 | Yes | CD8 | |
| 862 | ILTSLLVLV | NSP6 | | CD8 | A*02:01 |
| 863 | FLYENAFLP | NSP6 | | CD8 | A*02:01 |
| 864 | FLYENAFLPFA | NSP6 | | CD8 | A*02:01 |
| 865 | LPFAMGIIAM | NSP6 | | CD8 | B*07:02 |
| 866 | SAFAMMFVK | NSP6 | Yes | CD8 | A*11:01 |
| 867 | MFVKHKHAF | NSP6 | | CD8 | C*07:02 |
| 868 | FVKHKHAFL | NSP6 | | CD8 | B*08:01 |
| 869 | FLCLFLLPSLATV | NSP6 | Yes | CD8 | |
| 870 | LFLLPSLATV | NSP6 | | CD8 | A*02:01 |
| 871 | FLLPSLATVA | NSP6 | | CD8 | A*02:01 |
| 872 | FLLPSLATV | NSP6 | Yes | CD8 | A*02:01 |
| 873 | VYMPASWVM | NSP6 | | CD8 | A*24:02 |
| 874 | MPASWVMRI | NSP6 | Yes | CD8 | B*07:02 |
| 875 | RIMTWLDMV | NSP6 | | CD8 | A*02:01 |
| 876 | WLDMVDTSL | NSP6 | | CD8 | A*02:01 |
| 877 | KLKDCVMYA | NSP6 | Yes | CD8 | A*02:01 |
| 878 | VMYASAVVLL | NSP6 | | CD8 | A*24:02 |
| 879 | MYASAVVLL | NSP6 | | CD8 | C*07:02 |
| 880 | YASAVVLLI | NSP6 | | CD8 | C*06:02 |
| 881 | TLMNVLTLV | NSP6 | | CD8 | A*02:01 |
| 882 | SMWALIISV | NSP6 | Yes | CD8 | A*02:01 |
| 883 | NYSGVVTTVMF | NSP6 | Yes | CD8 | |
| 884 | FLARGIVFM | NSP6 | | CD8 | A*02:01 |
| 885 | IFFITGNTL | NSP6 | | CD8 | A*24:02 |
| 886 | NRYFRLTL | NSP6 | | CD8 | C*06:02, C*07:02 |
| 887 | TLGVYDYLVST | NSP6 | Yes | CD8 | |
| 888 | GVYDYLVST | NSP6 | | CD8 | A*02:01 |
| 889 | YDYLVSTQEF | NSP6 | | CD8 | C*07:02 |
| 890 | FRYMNSQGL | NSP6 | | CD8 | |
| 891 | GLLPPKNSI | NSP6 | | CD8 | A*02:01 |
| 892 | KLNIKLLGV | NSP6 | | CD8 | A*02:01 |
| 893 | KLWAQCVQL | NSP7 | Yes | CD8 | A*02:01 |
| 894 | EAFEKMVSL | NSP7 | | CD8 | B*08:01 |
| 895 | SLLSVLLSM | NSP7 | | CD8 | A*02:01 |
| 896 | SEFSSLPSY | NSP8 | Yes | CD8 | B*44:03 |
| 897 | LKKLKKSL | NSP8 | | CD8 | B*08:01 |
| 898 | KMADQAMTQMY | NSP8 | | CD8 | B*15:01 |
| 899 | LMVVIPDYNTY | NSP8 | | CD8 | B*15:01 |
| 900 | TYKNTCDGTTF | NSP8 | | CD8 | A*24:02 |
| 901 | NTCDGTTFTY | NSP8 | Yes | CD8 | A*01:01 |
| 902 | TFTYASALW | NSP8 | | CD8 | A*24:02 |
| 903 | FTYASALWEI | NSP8 | Yes | CD8 | |
| 904 | SALWEIQQVV | NSP8 | Yes | CD8 | A*02:01 |
| 905 | ALWEIQQV | NSP8 | Yes | CD8 | A*02:01 |
| 906 | ALWEIQQVV | NSP8 | Yes | CD8 | A*02:01 |
| 907 | SEISMDNSPNL | NSP8 | | CD8 | |
| 908 | AWPLIVTAL | NSP8 | | CD8 | A*24:02 |
| 909 | ALRANSAVK | NSP8 | Yes | CD8 | |
| 910 | CTDDNALAYY | NSP9 | Yes | CD8 | A*01:01 |
| 911 | CTDDNALAY | NSP9 | Yes | CD8 | A*01:01 |
| 912 | SDGTGTIY | NSP9 | | CD8 | A*01:01 |
| 913 | YTELEPPCRF | NSP9 | Yes | CD8 | A*01:01 |
| 914 | VTDTPKGPK | NSP9 | Yes | CD8 | A*11:01 |
| 915 | GPKVKYLYF | NSP9 | | CD8 | B*08:01 |
| 916 | YLYFIKGLNNL | NSP9 | | CD8 | A*02:01 |
| 917 | YFIKGLNNL | NSP9 | | CD8 | C*07:02 |
| 918 | VPANSTVL | NSP10 | | CD8 | B*07:02 |
| 919 | VPANSTVLSF | NSP10 | | CD8 | B*07:02 |
| 920 | TVLSFCAFAV | NSP10 | Yes | CD8 | |
| 921 | YLASGGQPI | NSP10 | | CD8 | A*02:01 |
| 922 | DLKGKYVQI | NSP10 | Yes | CD8 | B*08:01 |
| 923 | VVYRAFDIY | NSP12 | | CD8 | B*15:01 |
| 924 | FDIYNDKVAGF | NSP12 | | CD8 | A*24:02 |
| 925 | KVAGFAKFL | NSP12 | | CD8 | A*32:01 |
| 926 | KVAGFAKFLK | NSP12 | | CD8 | A*11:01 |
| 927 | NLIDSYFVV | NSP12 | | CD8 | A*02:01 |
| 928 | YFVVKRHTF | NSP12 | | CD8 | A*24:02, B*08:01 |
| 929 | VPHISRQRL | NSP12 | | CD8 | B*07:02 |
| 930 | YTMADLVYAL | NSP12 | Yes | CD8 | |
| 931 | TMADLVYAL | NSP12 | Yes | CD8 | A*02:01 |
| 932 | TLKEILVTY | NSP12 | | CD8 | A*29:02 |
| 933 | FVENPDILRV | NSP12 | | CD8 | A*02:06 |
| 934 | VENPDILRV | NSP12 | | CD8 | B*44:03 |
| 935 | VENPDILRVY | NSP12 | | CD8 | B*44:02 |
| 936 | VRQALLKTV | NSP12 | | CD8 | C*06:02 |
| 937 | DAMRNAGIV | NSP12 | | CD8 | B*51:01 |
| 938 | SLLMPILTL | NSP12 | | CD8 | A*02:01 |
| 939 | LLMPILTLT | NSP12 | Yes | CD8 | |
| 940 | AESHVDTDLTKPY | NSP12 | | CD8 | B*44:02 |
| 941 | HVDTDLTKPY | NSP12 | | CD8 | A*01:01 |
| 942 | KPYIKWDLL | NSP12 | | CD8 | B*07:02 |
| 943 | KLFDRYFKY | NSP12 | Yes | CD8 | A*03:01 |
| 944 | RYFKYWDQTY | NSP12 | | CD8 | A*24:02 |
| 945 | ILHCANFNV | NSP12 | | CD8 | |
| 946 | STVFPPTSF | NSP12 | | CD8 | B*57:01 |
| 947 | FPPTSFGPL | NSP12 | | CD8 | |
| 948 | TSFGPLVRK | NSP12 | | CD8 | A*03:01 |
| 949 | SFGPLVRKI | NSP12 | | CD8 | A*24:02 |
| 950 | KIFVDGVPFV | NSP12 | | CD8 | A*02:01 |
| 951 | FVDGVPFVV | NSP12 | Yes | CD8 | A*02:01 |
| 952 | FVVSTGYHFR | NSP12 | | CD8 | A*68:01 |
| 953 | VVSTGYHFR | NSP12 | | CD8 | A*11:01 |
| 954 | NLHSSRLSF | NSP12 | | CD8 | B*08:01 |
| 955 | QTVKPGNFNK | NSP12 | | CD8 | A*11:01 |
| 956 | DFYDFAVSKGFFK | NSP12 | | CD8 | A*33:01 |
| 957 | FAVSKGFFK | NSP12 | | CD8 | A*11:01 |
| 958 | AAISDYDYYR | NSP12 | | CD8 | A*68:01 |
| 959 | AAISDYDYY | NSP12 | | CD8 | A*01:01 |
| 960 | AISDYDYYR | NSP12 | | CD8 | A*11:01 |
| 961 | ISDYDYYRY | NSP12 | Yes | CD8 | |
| 962 | YRYNLPTMC | NSP12 | | CD8 | C*06:02 |
| 963 | YRYNLPTM | NSP12 | | CD8 | C*07:02 |
| 964 | RQLLFVVEV | NSP12 | Yes | CD8 | A*02:01 |
| 965 | FVVEVVDKY | NSP12 | | CD8 | B*15:01 |
| 966 | VVDKYFDCY | NSP12 | Yes | CD8 | |
| 967 | KSAGFPFNKW | NSP12 | | CD8 | B*57:01 |
| 968 | KSAGFPFNK | NSP12 | | CD8 | A*03:01 |
| 969 | ARLYYDSMSY | NSP12 | | CD8 | C*07:02 |
| 970 | RLYYDSMSY | NSP12 | Yes | CD8 | B*15:01 |
| 971 | FAYTKRNVI | NSP12 | | CD8 | B*51:01 |
| 972 | NVIPTITQM | NSP12 | | CD8 | C*07:01 |
| 973 | IPTITQMNL | NSP12 | | CD8 | B*07:02 |
| 974 | TITQMNLKY | NSP12 | | CD8 | A*01:01 |
| 975 | YAISAKNRAR | NSP12 | | CD8 | A*68:01 |
| 976 | SAKNRARTV | NSP12 | | CD8 | C*06:02 |
| 977 | SICSTMTNR | NSP12 | | CD8 | A*33:01 |
| 978 | IAATRGATV | NSP12 | | CD8 | B*51:01 |
| 979 | ATVVIGTSK | NSP12 | | CD8 | A*11:01 |
| 980 | YSDVENPHLMGW | NSP12 | | CD8 | B*44:02 |
| 981 | VENPHLMGWD | NSP12 | | CD8 | B*44:02 |
| 982 | MPNMLRIMASL | NSP12 | | CD8 | B*07:02 |
| 983 | NMLRIMASL | NSP12 | | CD8 | |
| 984 | MLRIMASL | NSP12 | | CD8 | B*08:01 |
| 985 | LRIMASLVL | NSP12 | | CD8 | C*07:02 |
| 986 | IMASLVLAR | NSP12 | | CD8 | A*33:01 |
| 987 | MASLVLARK | NSP12 | | CD8 | A*68:01 |
| 988 | RLANECAQV | NSP12 | | CD8 | A*02:01 |
| 989 | MVMCGGSLYV | NSP12 | Yes | CD8 | |
| 990 | TSSGDATTAY | NSP12 | | CD8 | A*01:01 |
| 991 | VRNLQHRLY | NSP12 | | CD8 | C*07:01 |
| 992 | DTDFVNEFY | NSP12 | Yes | CD8 | A*01:01 |
| 993 | FVNEFYAYLR | NSP12 | | CD8 | A*33:01 |
| 994 | FVNEFYAYL | NSP12 | | CD8 | A*02:01 |
| 995 | FYAYLRKHF | NSP12 | Yes | CD8 | A*24:02 |
| 996 | YAYLRKHF | NSP12 | | CD8 | B*08:01 |
| 997 | LRKHFSMMI | NSP12 | | CD8 | C*06:02 |
| 998 | LSDDAVVCFNSTY | NSP12 | Yes | CD8 | |
| 999 | LYYQNNVFM | NSP12 | | CD8 | A*24:02 |
| 1000 | TETDLTKGPHEF | NSP12 | | CD8 | B*44:02 |
| 1001 | LVKQGDDYVY | NSP12 | | CD8 | B*15:01 |
| 1002 | KQGDDYVYL | NSP12 | | CD8 | A*02:01 |
| 1003 | DYVYLPYPDPSRI | NSP12 | | CD8 | B*51:01 |
| 1004 | VYLPYPDPSRI | NSP12 | | CD8 | B*51:01 |
| 1005 | YLPYPDPSRI | NSP12 | | CD8 | B*51:01 |
| 1006 | YLPYPDPSRIL | NSP12 | | CD8 | A*24:02 |
| 1007 | LPYPDPSRIL | NSP12 | | CD8 | B*07:02, B*51:01 |
| 1008 | RILGAGCFV | NSP12 | Yes | CD8 | |
| 1009 | LMIERFVSL | NSP12 | Yes | CD8 | A*02:01 |
| 1010 | QEYADVFHLY | NSP12 | | CD8 | A*29:02, B*44:03 |
| 1011 | YADVFHLYL | NSP12 | | CD8 | C*07:02 |
| 1012 | LYLQYIRKL | NSP12 | Yes | CD8 | C*07:02 |
| 1013 | LTNDNTSRYW | NSP12 | | CD8 | B*57:01 |
| 1014 | NTSRYWEPEFY | NSP12 | | CD8 | A*01:01 |
| 1015 | SRYWEPEF | NSP12 | | CD8 | C*07:01 |
| 1016 | WEPEFYEAM | NSP12 | | CD8 | B*40:01 |
| 1017 | AMYTPHTVL | NSP12 | | CD8 | A*32:01 |
| 1018 | TPHTVLQAV | NSP12 | | CD8 | B*51:01 |
| 1019 | VLQAVGACV | NSP13 | Yes | CD8 | |
| 1020 | LVLSVNPYV | NSP13 | Yes | CD8 | |
| 1021 | QLYLGGMSYY | NSP13 | | CD8 | B*15:01 |
| 1022 | KPPISFPL | NSP13 | | CD8 | B*07:02 |
| 1023 | KLFAAETLK | NSP13 | Yes | CD8 | A*03:01 |
| 1024 | KLSYGIATV | NSP13 | Yes | CD8 | A*02:01 |
| 1025 | VVYRGTTTYK | NSP13 | Yes | CD8 | A*03:01, A*11:01 |
| 1026 | VVYRGTTTY | NSP13 | Yes | CD8 | |
| 1027 | VYRGTTTYKL | NSP13 | Yes | CD8 | A*24:02 |
| 1028 | YRGTTTYKL | NSP13 | | CD8 | C*06:02 |
| 1029 | KLNVGDYFV | NSP13 | Yes | CD8 | A*02:01 |
| 1030 | APTLVPQEHYV | NSP13 | | CD8 | A*02:01 |
| 1031 | TLVPQEHYV | NSP13 | | CD8 | |
| 1032 | VPQEHYVRI | NSP13 | | CD8 | B*08:01 |
| 1033 | SSNVANYQK | NSP13 | Yes | CD8 | |
| 1034 | YQKVGMQKY | NSP13 | | CD8 | |
| 1035 | FAIGLALYY | NSP13 | | CD8 | C*07:02 |
| 1036 | YYPSARIVY | NSP13 | | CD8 | A*24:02 |
| 1037 | IPARARVEC | NSP13 | | CD8 | B*07:02 |
| 1038 | IPARARVECF | NSP13 | | CD8 | B*07:02 |
| 1039 | YVFCTVNAL | NSP13 | | CD8 | |
| 1040 | VVNARLRAK | NSP13 | | CD8 | A*11:01 |
| 1041 | VYIGDPAQL | NSP13 | Yes | CD8 | A*24:02, C*07:01 |
| 1042 | IVDTVSALV | NSP13 | Yes | CD8 | |
| 1043 | RPQIGVVREF | NSP13 | | CD8 | B*15:01 |
| 1044 | AVASKILGL | NSP13 | | CD8 | A*02:01 |
| 1045 | ILGLPTQTV | NSP13 | | CD8 | A*02:01 |
| 1046 | LEIPRRNVATL | NSP13 | | CD8 | B*07:02 |
| 1047 | IPRRNVATL | NSP13 | Yes | CD8 | B*07:02, B*08:01 |
| 1048 | EEAIRHVRAW | NSP14 | | CD8 | B*44:03 |
| 1049 | LQLGFSTGV | NSP14 | | CD8 | |
| 1050 | MYKGLPWNV | NSP14 | | CD8 | C*06:02 |
| 1051 | KNLSDRVVFV | NSP14 | | CD8 | A*02:01 |
| 1052 | VLWAHGFEL | NSP14 | Yes | CD8 | |
| 1053 | TYACWHHSI | NSP14 | Yes | CD8 | A*24:02 |
| 1054 | PFMIDVQQW | NSP14 | | CD8 | A*24:02 |
| 1055 | AIMTRCLAV | NSP14 | Yes | CD8 | |
| 1056 | IEYPIIGDEL | NSP14 | Yes | CD8 | B*40:01 |
| 1057 | ALLADKFPV | NSP14 | Yes | CD8 | A*02:01 |
| 1058 | LLADKFPVL | NSP14 | | CD8 | B*08:01 |
| 1059 | YKIEELFYSY | NSP14 | | CD8 | A*01:01 |
| 1060 | KIEELFYSY | NSP14 | | CD8 | B*15:01 |
| 1061 | SYATHSDKF | NSP14 | Yes | CD8 | A*24:02 |
| 1062 | FTDGVCLFW | NSP14 | | CD8 | A*01:01 |
| 1063 | SLYVNKHAF | NSP14 | | CD8 | B*08:01 |
| 1064 | YLDAYNMMI | NSP14 | Yes | CD8 | A*02:01 |
| 1065 | MMISAGFSL | NSP14 | Yes | CD8 | A*02:01 |
| 1066 | AGFSLWVYK | NSP14 | | CD8 | A*11:01 |
| 1067 | KQFDTYNLW | NSP14 | Yes | CD8 | B*15:01 |
| 1068 | YNLWNTFTRL | NSP14 | | CD8 | A*02:01 |
| 1069 | NLWNTFTRL | NSP14 | Yes | CD8 | A*02:01 |
| 1070 | NTFTRLQSL | NSP14 | | CD8 | C*07:01 |
| 1071 | SLENVAFNV | NSP15 | | CD8 | A*02:01 |
| 1072 | KVDGVDVEL | NSP15 | Yes | CD8 | A*02:01 |
| 1073 | TTLPVNVAF | NSP15 | | CD8 | |
| 1074 | TICAPLTVF | NSP15 | | CD8 | B*15:01 |
| 1075 | GRVDGQVDL | NSP15 | | CD8 | C*07:01 |
| 1076 | KVDGVVQQL | NSP15 | | CD8 | A*02:01 |
| 1077 | VVQQLPETY | NSP15 | | CD8 | B*15:01 |
| 1078 | KPRSQMEIDF | NSP15 | | CD8 | B*07:02 |
| 1079 | FIERYKLEGY | NSP15 | | CD8 | A*01:01 |
| 1080 | FIPMDSTVKNY | NSP15 | | CD8 | A*01:01 |
| 1081 | LLLDDFVEI | NSP15 | | CD8 | A*02:01 |
| 1082 | LLLDDFVEII | NSP15 | Yes | CD8 | |
| 1083 | SVVSKVVKV | NSP15 | | CD8 | A*02:01 |
| 1084 | MLWCKDGHV | NSP15 | Yes | CD8 | |
| 1085 | GVAMPNLYK | NSP16 | Yes | CD8 | |
| 1086 | VAMPNLYKM | NSP16 | | CD8 | B*57:01 |
| 1087 | KMQRMLLEK | NSP16 | Yes | CD8 | |
| 1088 | LPKGIMMNV | NSP16 | | CD8 | B*07:02 |
| 1089 | YLNTLTLAV | NSP16 | Yes | CD8 | |
| 1090 | GVAPGTAVLRQW | NSP16 | | CD8 | B*57:01 |
| 1091 | TLIGDCATV | NSP16 | Yes | CD8 | |
| 1092 | CATVHTANKW | NSP16 | | CD8 | B*57:01 |
| 1093 | KLMGHFAWW | NSP16 | | CD8 | A*32:01 |
| 1094 | SSEAFLIGCNY | NSP16 | | CD8 | A*01:01 |
| 1095 | REQIDGYVMHANY | NSP16 | | CD8 | B*44:02 |
| 1096 | YVMHANYIF | NSP16 | | CD8 | A*32:01 |
| 1097 | FWRNTNPIQL | NSP16 | | CD8 | C*07:01 |
| 1098 | WRNTNPIQL | NSP16 | | CD8 | C*07:01 |
| 1099 | NPIQLSSYSL | NSP16 | | CD8 | B*07:02 |
| 1100 | SYSLFDMSKF | NSP16 | | CD8 | A*24:02 |
| 1101 | FPLKLRGTA | NSP16 | | CD8 | B*07:02 |
| 1102 | FPLKLRGTAV | NSP16 | | CD8 | B*08:01 |
| 1103 | LRGTAVMSL | NSP16 | | CD8 | C*07:01 |
| 1104 | MDLFMRIFTI | ORF3a | Yes | CD8 | |
| 1105 | RIFTIGTVTLK | ORF3a | Yes | CD8 | |
| 1106 | FTIGTVTLK | ORF3a | | CD8 | A*68:01 |
| 1107 | FVRATATIPI | ORF3a | Yes | CD8 | |
| 1108 | ATIPIQASL | ORF3a | | CD8 | B*57:01 |
| 1109 | IPIQASLPF | ORF3a | Yes | CD8 | B*35:01, B*51:01 |
| 1110 | LPFGWLIV | ORF3a | | CD8 | B*51:01 |
| 1111 | IVGVALLAVF | ORF3a | Yes | CD8 | |
| 1112 | ALLAVFQSA | ORF3a | | CD8 | A*02:01 |
| 1113 | QSASKIITL | ORF3a | | CD8 | B*08:01 |
| 1114 | SASKIITLKKRW | ORF3a | | CD8 | B*57:01 |
| 1115 | SASKIITLK | ORF3a | | CD8 | A*03:01, A*11:01 |
| 1116 | ITLKKRWQL | ORF3a | | CD8 | B*08:01, B*57:01 |
| 1117 | ITLKKRWQLAL | ORF3a | Yes | CD8 | |
| 1118 | TLKKRWQLA | ORF3a | | CD8 | B*08:01 |
| 1119 | ALSKGVHFV | ORF3a | Yes | CD8 | A*02:01 |
| 1120 | NLLLLFVTV | ORF3a | | CD8 | A*02:01 |
| 1121 | FVTVYSHLL | ORF3a | | CD8 | A*02:01 |
| 1122 | TVYSHLLLV | ORF3a | | CD8 | A*02:01 |
| 1123 | VAAGLEAPF | ORF3a | | CD8 | B*35:01 |
| 1124 | AAGLEAPFLYLY | ORF3a | | CD8 | B*44:02 |
| 1125 | AAGLEAPFLY | ORF3a | | CD8 | A*01:01 |
| 1126 | AGLEAPFLY | ORF3a | | CD8 | A*29:02 |
| 1127 | GLEAPFLYL | ORF3a | | CD8 | A*02:01 |
| 1128 | LEAPFLYLY | ORF3a | | CD8 | A*29:02 |
| 1129 | APFLYLYAL | ORF3a | | CD8 | B*07:02, B*08:01 |
| 1130 | FLYLYALVY | ORF3a | | CD8 | C*07:02 |
| 1131 | LYLYALVYF | ORF3a | | CD8 | A*24:02 |
| 1132 | YLYALVYFL | ORF3a | Yes | CD8 | A*02:01 |
| 1133 | VYFLQSINF | ORF3a | Yes | CD8 | A*24:02 |
| 1134 | FVRIIMRLW | ORF3a | | CD8 | B*57:01 |
| 1135 | VRIIMRLWL | ORF3a | | CD8 | C*07:02 |
| 1136 | CRSKNPLLY | ORF3a | | CD8 | C*06:02 |
| 1137 | NPLLYDANY | ORF3a | | CD8 | B*53:01 |
| 1138 | NPLLYDANYFLCW | ORF3a | Yes | CD8 | |
| 1139 | NPLLYDANYFL | ORF3a | | CD8 | A*02:01 |
| 1140 | LLYDANYFL | ORF3a | Yes | CD8 | A*02:01 |
| 1141 | IPYNSVTSSIVI | ORF3a | | CD8 | B*51:01 |
| 1142 | IPYNSVTSSI | ORF3a | | CD8 | |
| 1143 | TTSPISEHDY | ORF3a | | CD8 | |
| 1144 | SEHDYQIGGYTEKW | ORF3a | Yes | CD8 | |
| 1145 | VLHSYFTSDYYQLY | ORF3a | Yes | CD8 | |
| 1146 | HSYFTSDYY | ORF3a | | CD8 | A*29:02 |
| 1147 | SYFTSDYYQLY | ORF3a | | CD8 | A*24:02 |
| 1148 | YFTSDYYQLY | ORF3a | | CD8 | A*01:01, A*29:02 |
| 1149 | YFTSDYYQL | ORF3a | | CD8 | C*07:02 |
| 1150 | FTSDYYQLY | ORF3a | Yes | CD8 | A*01:01, A*24:02 |
| 1151 | DYYQLYSTQL | ORF3a | | CD8 | A*24:02 |
| 1152 | YYQLYSTQL | ORF3a | Yes | CD8 | A*24:02, C*07:02 |
| 1153 | HVTFFIYNK | ORF3a | | CD8 | A*68:01 |
| 1154 | EEHVQIHTI | ORF3a | | CD8 | |
| 1155 | IYDEPTTTT | ORF3a | | CD8 | C*07:02 |
| 1156 | HLVDFQVTIA | ORF6 | | CD8 | A*02:01 |
| 1157 | HLVDFQVTI | ORF6 | Yes | CD8 | A*02:01 |
| 1158 | VTIAEILLI | ORF6 | | CD8 | |
| 1159 | LIIMRTFKV | ORF6 | | CD8 | B*08:01 |
| 1160 | RTFKVSIWNLDY | ORF6 | | CD8 | A*01:01 |
| 1161 | TFKVSIWNL | ORF6 | | CD8 | B*08:01 |
| 1162 | SIWNLDYIINL | ORF6 | | CD8 | A*02:01 |
| 1163 | LDYIINLII | ORF6 | | CD8 | |
| 1164 | IIKNLSKSLTENKY | ORF6 | | CD8 | |
| 1165 | QECVRGTTVL | ORF7a | | CD8 | |
| 1166 | LLKEPCSSGTY | ORF7a | | CD8 | B*15:01 |
| 1167 | YEGNSPFHPL | ORF7a | | CD8 | B*40:01 |
| 1168 | EGNSPFHPL | ORF7a | | CD8 | B*08:01 |
| 1169 | SPFHPLADNKFAL | ORF7a | | CD8 | |
| 1170 | HPLADNKFAL | ORF7a | | CD8 | B*08:01 |
| 1171 | KFALTCFSTQF | ORF7a | | CD8 | A*24:02 |
| 1172 | FACPDGVKHVY | ORF7a | | CD8 | A*01:01 |
| 1173 | QLRARSVSPK | ORF7a | Yes | CD8 | A*03:01 |
| 1174 | RARSVSPKL | ORF7a | Yes | CD8 | B*07:02 |
| 1175 | RARSVSPKLFIR | ORF7a | Yes | CD8 | |
| 1176 | KLFIRQEEV | ORF7a | Yes | CD8 | |
| 1177 | FIRQEEVQELY | ORF7a | | CD8 | A*01:01, B*15:01 |
| 1178 | VQELYSPIFLIV | ORF7a | Yes | CD8 | |
| 1179 | SPIFLIVAA | ORF7a | | CD8 | B*07:02 |
| 1180 | VFITLCFTLK | ORF7a | Yes | CD8 | |
| 1181 | IMLIIFWFSL | ORF7b | Yes | CD8 | |
| 1182 | FLGIITTV | ORF8 | | CD8 | A*02:01 |
| 1183 | QSCTQHQPY | ORF8 | | CD8 | A*01:01 |
| 1184 | YVVDDPCPIHFY | ORF8 | Yes | CD8 | |
| 1185 | VDDPCPIHFY | ORF8 | | CD8 | A*01:01 |
| 1186 | RVGARKSAPL | ORF8 | | CD8 | |
| 1187 | IQYIDIGNY | ORF8 | Yes | CD8 | |
| 1188 | GNYTVSCLPFTI | ORF8 | Yes | CD8 | |
| 1189 | EPKLGSLVV | ORF8 | | CD8 | B*07:02 |
| 1190 | KLGSLVVRC | ORF8 | Yes | CD8 | A*02:01 |
| 1191 | YEDFLEYHDVRVVL | ORF8 | Yes | CD8 | |
| 1192 | LEYHDVRVVL | ORF8 | Yes | CD8 | B*40:01 |
| 1193 | EYHDVRVVL | ORF8 | | CD8 | A*24:02 |
| 1194 | EYHDVRVVLDF | ORF8 | | CD8 | A*24:02 |
| 1195 | YINVFAFPF | ORF10 | | CD8 | A*02:01 |
| 1196 | NVFAFPFTI | ORF10 | | CD8 | A*02:01 |
| 1197 | SLLLCRMNSRNYIA | ORF10 | Yes | CD8 | |
| 1198 | NYIAQVDVVNFNL | ORF10 | Yes | CD8 | |
| 1199 | FVFLVLLPL | S | | CD8 | A*02:01 |
| 1200 | LPLVSSQCV | S | | CD8 | B*51:01 |
| 1201 | NLTTRTQL | S | | CD8 | |
| 1202 | TRTQLPPAY | S | | CD8 | C*07:02 |
| 1203 | LPPAYTNSF | S | | CD8 | B*07:02, B*35:01, B*53:01 |
| 1204 | YTNSFTRGVY | S | Yes | CD8 | A*01:01, A*26:01 |
| 1205 | YTNSFTRGVYY | S | | CD8 | A*01:01 |
| 1206 | NSFTRGVYY | S | | CD8 | A*26:01, A*29:02, A*68:01 |
| 1207 | GVYYPDKVFR | S | | CD8 | A*03:01, A*68:01 |
| 1208 | VYYPDKVFRSSVLH | S | Yes | CD8 | |
| 1209 | VYYPDKVF | S | | CD8 | A*24:02 |
| 1210 | KVFRSSVLH | S | | CD8 | A*03:01, A*30:01 |
| 1211 | FRSSVLHST | S | | CD8 | C*07:01 |
| 1212 | STQDLFLPFF | S | Yes | CD8 | A*01:01 |
| 1213 | STQDLFLPF | S | | CD8 | A*01:01 |
| 1214 | TQDLFLPFF | S | | CD8 | A*24:02 |
| 1215 | FLPFFSNVTW | S | | CD8 | B*53:01 |
| 1216 | FLPFFSNVTWFHAI | S | Yes | CD8 | |
| 1217 | FLPFFSNV | S | | CD8 | A*02:01 |
| 1218 | PFFSNVTWF | S | | CD8 | A*24:02 |
| 1219 | HVSGTNGTK | S | | CD8 | A*68:01 |
| 1220 | RFDNPVLPF | S | Yes | CD8 | A*24:02, C*07:02 |
| 1221 | FDNPVLPFNDGVYF | S | | CD8 | B*35:01 |
| 1222 | VLPFNDGVYFA | S | | CD8 | A*02:01 |
| 1223 | LPFNDGVYF | S | | CD8 | B*07:02, B*35:01, B*51:01 |
| 1224 | DGVYFASTEK | S | | CD8 | A*68:01 |
| 1225 | GVYFASTEK | S | Yes | CD8 | A*03:01, A*11:01, A*68:01 |
| 1226 | TEKSNIIRGW | S | Yes | CD8 | B*44:02, B*44:03 |
| 1227 | WIFGTTLDSK | S | | CD8 | |
| 1228 | TLDSKTQSL | S | Yes | CD8 | A*02:01, B*08:01, C*07:02 |
| 1229 | FCNDPFLGVYY | S | Yes | CD8 | A*01:01 |
| 1230 | CNDPFLGVY | S | | CD8 | A*01:01 |
| 1231 | GVYYHKNNK | S | | CD8 | A*03:01 |
| 1232 | YYHKNNKSW | S | | CD8 | A*24:02 |
| 1233 | KSWMESEFRVY | S | Yes | CD8 | |
| 1234 | SWMESEFRV | S | | CD8 | A*24:02 |
| 1235 | SWMESEFRVY | S | | CD8 | A*29:02 |
| 1236 | VYSSANNCTFEY | S | Yes | CD8 | |
| 1237 | VYSSANNCTF | S | | CD8 | A*24:02 |
| 1238 | SSANNCTFEY | S | Yes | CD8 | A*01:01 |
| 1239 | SANNCTFEY | S | | CD8 | A*29:02, B*35:01 |
| 1240 | CTFEYVSQPFLM | S | Yes | CD8 | |
| 1241 | TFEYVSQPFLM | S | | CD8 | A*24:02 |
| 1242 | FEYVSQPFLM | S | | CD8 | B*40:01 |
| 1243 | EYVSQPFLM | S | | CD8 | A*24:02 |
| 1244 | FKNLREFVF | S | | CD8 | C*07:01 |
| 1245 | FVFKNIDGY | S | Yes | CD8 | A*26:01, A*29:02 |
| 1246 | VFKNIDGYF | S | | CD8 | A*24:02 |
| 1247 | KIYSKHTPI | S | | CD8 | B*08:01 |
| 1248 | IYSKHTPINL | S | Yes | CD8 | |
| 1249 | TPINLVRDL | S | Yes | CD8 | B*07:02 |
| 1250 | LPQGFSALEPL | S | | CD8 | B*07:02 |
| 1251 | LPQGFSAL | S | Yes | CD8 | B*07:02, B*08:01 |
| 1252 | LEPLVDLPI | S | | CD8 | |
| 1253 | EPLVDLPI | S | | CD8 | B*51:01 |
| 1254 | DLPIGINITRFQTL | S | Yes | CD8 | |
| 1255 | LPIGINITRF | S | | CD8 | B*07:02, B*35:01 |
| 1256 | INITRFQTL | S | | CD8 | B*08:01 |
| 1257 | NITRFQTL | S | | CD8 | B*08:01 |
| 1258 | LLALHRSYL | S | Yes | CD8 | |
| 1259 | WTAGAAAYY | S | Yes | CD8 | A*26:01, A*29:02, B*35:01 |
| 1260 | WTAGAAAYYVGY | S | Yes | CD8 | |
| 1261 | GAAAYYVGY | S | | CD8 | A*29:02 |
| 1262 | YYVGYLQPRTFLL | S | Yes | CD8 | |
| 1263 | YYVGYLQPRTF | S | Yes | CD8 | A*24:02 |
| 1264 | VGYLQPRTFL | S | | CD8 | A*24:02 |
| 1265 | GYLQPRTFLL | S | | CD8 | A*24:02 |
| 1266 | YLQPRTFLL | S | Yes | CD8 | A*02:01, A*24:02, B*08:01 |
| 1267 | CALDPLSETK | S | | CD8 | |
| 1268 | ALDPLSETK | S | | CD8 | A*03:01 |
| 1269 | SETKCTLKSF | S | | CD8 | B*44:02, B*44:03 |
| 1270 | SETKCTLKSFTVEK | S | Yes | CD8 | |
| 1271 | ETKCTLKSF | S | | CD8 | A*26:01 |
| 1272 | IYQTSNFRV | S | | CD8 | A*24:02 |
| 1273 | RVQPTESIVRF | S | | CD8 | B*07:02 |
| 1274 | QPTESIVRF | S | | CD8 | B*07:02, B*35:01 |
| 1275 | TESIVRFPNITNL | S | | CD8 | B*40:01 |
| 1276 | RFPNITNLCPF | S | | CD8 | A*24:02 |
| 1277 | FGEVFNATRFASVY | S | Yes | CD8 | |
| 1278 | GEVFNATRF | S | | CD8 | B*40:01, B*44:02, B*44:03 |
| 1279 | EVFNATRFASVY | S | | CD8 | A*26:01 |
| 1280 | NATRFASVY | S | | CD8 | B*35:01 |
| 1281 | TRFASVYAW | S | | CD8 | C*07:02 |
| 1282 | RFASVYAWNR | S | | CD8 | A*31:01 |
| 1283 | FASVYAWNR | S | | CD8 | A*68:01 |
| 1284 | SVYAWNRKR | S | | CD8 | A*03:01 |
| 1285 | YAWNRKRI | S | | CD8 | B*51:01 |
| 1286 | RISNCVADY | S | Yes | CD8 | |
| 1287 | CVADYSVLY | S | Yes | CD8 | A*01:01, A*26:01, A*29:02, |
| | | | | | B*15:01 |
| 1288 | YSVLYNSASFSTFK | S | Yes | CD8 | |
| 1289 | NSASFSTFK | S | | CD8 | A*68:01 |
| 1290 | SASFSTFKCY | S | | CD8 | A*01:01 |
| 1291 | KCYGVSPTK | S | Yes | CD8 | A*03:01 |
| 1292 | KLNDLCFTNV | S | | CD8 | A*02:01 |
| 1293 | NVYADSFVIR | S | | CD8 | A*68:01 |
| 1294 | FVIRGDEVR | S | | CD8 | A*68:01 |
| 1295 | QIAPGQTGK | S | | CD8 | A*68:01 |
| 1296 | KIADYNYKL | S | Yes | CD8 | A*02:01 |
| 1297 | KLPDDFTGCV | S | Yes | CD8 | A*02:01 |
| 1298 | NLDSKVGGNY | S | Yes | CD8 | |
| 1299 | DSKVGGNYNY | S | | CD8 | A*26:01 |
| 1300 | KVGGNYNYLY | S | | CD8 | A*29:02 |
| 1301 | VGGNYNYLY | S | | CD8 | A*29:02 |
| 1302 | GNYNYLYRLF | S | | CD8 | A*24:02 |
| 1303 | NYNYLYRLF | S | Yes | CD8 | A*24:02 |
| 1304 | NYNYLYRLFRK | S | Yes | CD8 | |
| 1305 | YNYLYRLFR | S | | CD8 | A*31:01 |
| 1306 | RLFRKSNLK | S | | CD8 | A*03:01, A*31:01 |
| 1307 | KSNLKPFER | S | | CD8 | A*31:01 |
| 1308 | KPFERDISTEI | S | | CD8 | B*07:02 |
| 1309 | KPFERDISTEIY | S | Yes | CD8 | |
| 1310 | FERDISTEIY | S | | CD8 | B*15:01, B*44:03 |
| 1311 | FERDISTEI | S | | CD8 | B*40:01 |
| 1312 | NGVEGENCY | S | | CD8 | |
| 1313 | YFPLQSYGF | S | Yes | CD8 | A*24:02 |
| 1314 | YGFQPTNGV | S | | CD8 | B*51:01 |
| 1315 | FQPTNGVGY | S | Yes | CD8 | |
| 1316 | VGYQPYRVV | S | | CD8 | C*06:02 |
| 1317 | GYQPYRVVVLSF | S | Yes | CD8 | |
| 1318 | YQPYRVVVL | S | | CD8 | C*06:02 |
| 1319 | QPYRVVVL | S | Yes | CD8 | B*07:02, B*08:01 |
| 1320 | QPYRVVVLSF | S | | CD8 | B*07:02 |
| 1321 | SFELLHAPATV | S | Yes | CD8 | A*02:01 |
| 1322 | FELLHAPATV | S | | CD8 | A*02:01 |
| 1323 | ELLHAPATV | S | | CD8 | A*02:01 |
| 1324 | GPKKSTNLV | S | Yes | CD8 | |
| 1325 | LVKNKCVNF | S | | CD8 | B*15:01 |
| 1326 | VLTESNKKF | S | | CD8 | B*15:01 |
| 1327 | TESNKKFLPFQQF | S | | CD8 | B*44:02 |
| 1328 | KFLPFQQFGR | S | | CD8 | A*31:01 |
| 1329 | DAVRDPQTL | S | | CD8 | B*51:01 |
| 1330 | EILDITPCSF | S | Yes | CD8 | A*26:01 |
| 1331 | TPCSFGGVSV | S | | CD8 | B*07:02 |
| 1332 | NTSNQVAVLY | S | | CD8 | A*26:01 |
| 1333 | TSNQVAVLY | S | | CD8 | A*26:01, B*35:01, B*57:01 |
| 1334 | YQDVNCTEV | S | | CD8 | A*02:06 |
| 1335 | VAIHADQLTPTW | S | | CD8 | B*57:01 |
| 1336 | IHADQLTPTW | S | | CD8 | B*53:01 |
| 1337 | QLTPTWRVY | S | | CD8 | A*30:02 |
| 1338 | RVYSTGSNV | S | | CD8 | A*30:01 |
| 1339 | RVYSTGSNVF | S | | CD8 | A*24:02, B*15:01 |
| 1340 | VYSTGSNVFQTR | S | Yes | CD8 | |
| 1341 | STGSNVFQTR | S | | CD8 | A*31:01, A*68:01 |
| 1342 | IGAEHVNNSY | S | Yes | CD8 | |
| 1343 | AEHVNNSY | S | | CD8 | B*44:02, B*44:03 |
| 1344 | YECDIPIGAGI | S | | CD8 | B*40:01 |
| 1345 | IPIGAGICASY | S | Yes | CD8 | |
| 1346 | QTNSPRRAR | S | | CD8 | A*31:01 |
| 1347 | SPRRARSVA | S | Yes | CD8 | B*07:02 |
| 1348 | SPRRARSV | S | | CD8 | B*07:02, B*08:01 |
| 1349 | RSVASQSII | S | | CD8 | B*57:01 |
| 1350 | SVASQSIIAY | S | Yes | CD8 | A*26:01, A*29:02 |
| 1351 | VASQSIIAY | S | Yes | CD8 | A*29:02, B*15:01, B*35:01 |
| 1352 | SIIAYTMSL | S | Yes | CD8 | A*02:01, B*08:01 |
| 1353 | YTMSLGAENSVAY | S | | CD8 | A*26:01 |
| 1354 | LGAENSVAY | S | | CD8 | B*35:01 |
| 1355 | LGAENSVAYSNN | S | Yes | CD8 | |
| 1356 | AYSNNSIAI | S | | CD8 | A*24:02 |
| 1357 | NSIAIPTNF | S | | CD8 | B*57:01 |
| 1358 | IAIPTNFTI | S | | CD8 | B*51:01, B*53:01 |
| 1359 | IPTNFTISV | S | | CD8 | B*07:02, B*51:01 |
| 1360 | FTISVTTEI | S | | CD8 | A*26:01 |
| 1361 | FTISVTTEIL | S | Yes | CD8 | |
| 1362 | TEILPVSMTK | S | Yes | CD8 | |
| 1363 | EILPVSMTK | S | | CD8 | A*03:01, A*68:01 |
| 1364 | KTSVDCTMYI | S | | CD8 | |
| 1365 | STECSNLLLQY | S | Yes | CD8 | A*01:01 |
| 1366 | TECSNLLLQY | S | Yes | CD8 | B*44:02, B*44:03 |
| 1367 | LLQYGSFCT | S | Yes | CD8 | |
| 1368 | GSFCTQLNR | S | | CD8 | |
| 1369 | TQLNRALTGI | S | | CD8 | |
| 1370 | QEVFAQVKQIY | S | | CD8 | B*44:02, B*44:03 |
| 1371 | QEVFAQVKQIYK | S | Yes | CD8 | |
| 1372 | EVFAQVKQI | S | | CD8 | B*51:01 |
| 1373 | EVFAQVKQIY | S | | CD8 | A*26:01 |
| 1374 | VFAQVKQIY | S | | CD8 | A*29:02, C*07:01 |
| 1375 | KQIYKTPPIKDF | S | Yes | CD8 | |
| 1376 | IYKTPPIKDF | S | | CD8 | C*07:02 |
| 1377 | ILPDPSKPSK | S | | CD8 | |
| 1378 | SFIEDLLF | S | | CD8 | A*24:02 |
| 1379 | LLFNKVTLA | S | Yes | CD8 | A*02:01 |
| 1380 | TLADAGFIK | S | | CD8 | A*03:01 |
| 1381 | LADAGFIKQY | S | | CD8 | A*01:01 |
| 1382 | ADAGFIKQY | S | | CD8 | B*44:02 |
| 1383 | GLTVLPPLL | S | | CD8 | A*02:01 |
| 1384 | LPPLLTDEM | S | | CD8 | B*35:01 |
| 1385 | LLTDEMIAQY | S | | CD8 | A*01:01 |
| 1386 | LTDEMIAQY | S | Yes | CD8 | A*01:01, A*29:02, B*35:01, |
| | | | | | C*07:02 |
| 1387 | LTDEMIAQYT | S | | CD8 | A*01:01 |
| 1388 | TDEMIAQY | S | | CD8 | A*01:01 |
| 1389 | MIAQYTSAL | S | Yes | CD8 | B*07:02, B*08:01 |
| 1390 | GTITSGWTF | S | Yes | CD8 | A*24:02, B*57:01 |
| 1391 | WTFGAGAAL | S | | CD8 | A*26:01 |
| 1392 | LQIPFAMQMAY | S | Yes | CD8 | |
| 1393 | QIPFAMQMAY | S | | CD8 | B*35:01 |
| 1394 | IPFAMQMAY | S | | CD8 | B*35:01, B*51:01 |
| 1395 | FAMQMAYRF | S | | CD8 | B*35:01 |
| 1396 | TQNVLYENQK | S | Yes | CD8 | |
| 1397 | YENQKLIANQF | S | | CD8 | B*44:02 |
| 1398 | NQKLIANQF | S | Yes | CD8 | |
| 1399 | IANQFNSAI | S | | CD8 | B*51:01 |
| 1400 | LSSTASALGK | S | | CD8 | |
| 1401 | AQALNTLVKQL | S | Yes | CD8 | |
| 1402 | ALNTLVKQL | S | | CD8 | A*02:01 |
| 1403 | SVLNDILSR | S | | CD8 | A*68:01 |
| 1404 | SVLNDILSRL | S | | CD8 | |
| 1405 | VLNDILSRL | S | Yes | CD8 | A*02:01 |
| 1406 | RLDKVEAEVQI | S | | CD8 | A*02:01 |
| 1407 | RLDKVEAEV | S | Yes | CD8 | A*02:01 |
| 1408 | VEAEVQIDRLITGR | S | Yes | CD8 | |
| 1409 | AEVQIDRL | S | | CD8 | B*40:01 |
| 1410 | AEVQIDRLI | S | | CD8 | B*44:02, B*44:03 |
| 1411 | LITGRLQSLQTYV | S | Yes | CD8 | |
| 1412 | ITGRLQSLQTY | S | | CD8 | A*01:01 |
| 1413 | LITGRLQSL | S | | CD8 | A*02:01 |
| 1414 | RLQSLQTY | S | | CD8 | B*15:01 |
| 1415 | RLQSLQTYV | S | Yes | CD8 | A*02:01 |
| 1416 | AEIRASANLAATK | S | Yes | CD8 | |
| 1417 | AEIRASANL | S | | CD8 | B*40:01, B*44:02, B*44:03 |
| 1418 | RASANLAATK | S | | CD8 | A*03:01 |
| 1419 | SKRVDFCGKGY | S | | CD8 | A*01:01 |
| 1420 | RVDFCGKGY | S | | CD8 | |
| 1421 | YHLMSFPQSA | S | Yes | CD8 | |
| 1422 | HLMSFPQSA | S | Yes | CD8 | A*02:01 |
| 1423 | SFPQSAPHGVVF | S | | CD8 | A*24:02 |
| 1424 | FPQSAPHGV | S | | CD8 | B*07:02, B*53:01 |
| 1425 | FPQSAPHGVVF | S | Yes | CD8 | B*08:01, B*35:01 |
| 1426 | QSAPHGVVF | S | | CD8 | C*07:02 |
| 1427 | APHGVVFLHVTYV | S | Yes | CD8 | |
| 1428 | APHGVVFLHV | S | Yes | CD8 | B*07:02 |
| 1429 | APHGVVFL | S | | CD8 | B*07:02 |
| 1430 | GVVFLHVTY | S | | CD8 | A*32:01 |
| 1431 | VVFLHVTYV | S | Yes | CD8 | A*02:01, A*02:06 |
| 1432 | HVTYVPAQEK | S | | CD8 | A*68:01 |
| 1433 | HVTYVPAQEKNF | S | Yes | CD8 | |
| 1434 | VTYVPAQEK | S | | CD8 | A*03:01, A*30:01 |
| 1435 | TYVPAQEKNFT | S | | CD8 | A*24:02 |
| 1436 | FPREGVFV | S | | CD8 | B*07:02, B*51:01 |
| 1437 | REGVFVSNGTHW | S | Yes | CD8 | B*44:03 |
| 1438 | GVFVSNGTHW | S | | CD8 | B*57:01 |
| 1439 | VFVSNGTHW | S | | CD8 | A*24:02 |
| 1440 | VFVSNGTHWF | S | | CD8 | A*24:02 |
| 1441 | FVSNGTHWF | S | | CD8 | A*26:01, B*35:01 |
| 1442 | GTHWFVTQR | S | Yes | CD8 | A*11:01, A*31:01 |
| 1443 | HWFVTQRNF | S | | CD8 | A*24:02 |
| 1444 | WFVTQRNFY | S | | CD8 | A*29:02 |
| 1445 | IITTDNTFV | S | | CD8 | |
| 1446 | TVYDPLQPELDSFK | S | Yes | CD8 | A*03:01 |
| 1447 | VYDPLQPELDSF | S | Yes | CD8 | A*24:02 |
| 1448 | DSFKEELDKY | S | | CD8 | |
| 1449 | SFKEELDKY | S | | CD8 | A*29:02 |
| 1450 | NASVVNIQK | S | | CD8 | A*68:01 |
| 1451 | KEIDRLNEV | S | | CD8 | B*40:01, B*44:02, B*44:03 |
| 1452 | RLNEVAKNL | S | Yes | CD8 | A*02:01 |
| 1453 | NLNESLIDL | S | Yes | CD8 | A*02:01 |
| 1454 | NESLIDLQEL | S | | CD8 | B*40:01 |
| 1455 | SLIDLQEL | S | | CD8 | A*02:01 |
| 1456 | LQELGKYEQY | S | | CD8 | A*01:01 |
| 1457 | QELGKYEQY | S | | CD8 | B*44:02, B*44:03 |
| 1458 | YEQYIKWPWYI | S | Yes | CD8 | A*24:02 |
| 1459 | YEQYIKWPW | S | | CD8 | B*44:02, B*44:03 |
| 1460 | QYIKWPWYIW | S | | CD8 | A*23:01 |
| 1461 | QYIKWPWYI | S | Yes | CD8 | A*24:02, C*06:02 |
| 1462 | KWPWYIWLGF | S | Yes | CD8 | A*24:02 |
| 1463 | FIAGLIAIV | S | Yes | CD8 | A*02:01 |
| 1464 | CMTSCCSCLK | S | | CD8 | |
| 1465 | FDEDDSEPVL | S | | CD8 | B*40:01 |
| 1466 | SEPVLKGVKL | S | Yes | CD8 | B*40:01 |
| 1467 | EPVLKGVKL | S | | CD8 | B*07:02 |
| 1468 | VLKGVKLHY | S | | CD8 | A*29:02 |

[0191] A set of 399 more dominant epitopes are defined by being recognized by 3 or more donors/different studies (110 CD4, 289 CD8). Accordingly new pools have been designed (the number of epitopes in each pool is indicated after the =sign)

CD8S (D) = 53 (Table 2). CD8S (D) Megapool

| SEQ | | | | | |
|---|---|---|---|---|---|
| ID | | Anti- | | | |
| NO: | Description | gen | Start | End | Dominant |
| 1469 | YTNSFTRGVY | S | 28 | 37 | Yes |
| 1470 | STQDLFLPFF | S | 50 | 59 | Yes |
| 1471 | RFDNPVLPF | S | 78 | 86 | Yes |
| 1472 | GVYFASTEK | S | 89 | 97 | Yes |
| 1473 | TEKSNIIRGW | S | 95 | 104 | Yes |
| 1474 | TLDSKTQSL | S | 109 | 117 | Yes |
| 1475 | SSANNCTFEY | S | 161 | 170 | Yes |
| 1476 | FVFKNIDGY | S | 192 | 200 | Yes |
| 1477 | IYSKHTPINL | S | 203 | 212 | Yes |
| 1478 | TPINL VRDL | S | 208 | 216 | Yes |
| 1479 | LLALHRSYL | S | 241 | 249 | Yes |
| 1480 | WTAGAAAYY | S | 258 | 266 | Yes |
| 1481 | YLQPRTFLL | S | 269 | 277 | Yes |
| 1482 | RISNCVADY | S | 357 | 365 | Yes |
| 1483 | CVADYSVLY | S | 361 | 369 | Yes |
| 1484 | KCYGVSPTK | S | 378 | 386 | Yes |
| 1485 | KIADYNYKL | S | 417 | 425 | Yes |
| 1486 | KLPDDFTGCV | S | 424 | 433 | Yes |
| 1487 | NLDSKVGGNY | S | 440 | 449 | Yes |
| 1488 | NYNYLYRLF | S | 448 | 456 | Yes |
| 1489 | YFPLQSYGF | S | 489 | 497 | Yes |
| 1490 | FQPTNGVGY | S | 497 | 505 | Yes |
| 1491 | GPKKSTNLV | S | 526 | 534 | Yes |
| 1492 | EILDITPCSF | S | 583 | 592 | Yes |
| 1493 | IGAEHVNNSY | S | 651 | 660 | Yes |
| 1494 | SPRRARSVA | S | 680 | 688 | Yes |
| 1495 | SVASQSIIAY | S | 686 | 695 | Yes |
| 1496 | VASQSIIAY | S | 687 | 695 | Yes |
| 1497 | SIIAYTMSL | S | 691 | 699 | Yes |
| 1498 | FTISVTTEIL | S | 718 | 727 | Yes |
| 1499 | TEILPVSMTK | S | 724 | 733 | Yes |
| 1500 | TECSNLLLQY | S | 747 | 756 | Yes |
| 1501 | LLQYGSFCT | S | 753 | 761 | Yes |
| 1502 | LLFNKVTLA | S | 821 | 829 | Yes |
| 1503 | LTDEMIAQY | S | 865 | 873 | Yes |
| 1504 | MIAQYTSAL | S | 869 | 877 | Yes |
| 1505 | GTITSGWTF | S | 880 | 888 | Yes |
| 1506 | TQNVLYENQK | S | 912 | 921 | Yes |
| 1507 | NQKLIANQF | S | 919 | 927 | Yes |
| 1508 | VLNDILSRL | S | 976 | 984 | Yes |
| 1509 | RLDKVEAEV | S | 983 | 991 | Yes |
| 1510 | RLQSLQTYV | S | 1000 | 1008 | Yes |
| 1511 | YHLMSFPQSA | S | 1047 | 1056 | Yes |
| 1512 | HLMSFPQSA | S | 1048 | 1056 | Yes |
| 1513 | APHGVVFLHV | S | 1056 | 1065 | Yes |
| 1514 | VVFLHVTYV | S | 1060 | 1068 | Yes |
| 1515 | GTHWFVTQR | S | 1099 | 1107 | Yes |
| 1516 | RLNEVAKNL | S | 1185 | 1193 | Yes |
| 1517 | NLNESLIDL | S | 1192 | 1200 | Yes |
| 1518 | QYIKWPWYI | S | 1208 | 1216 | Yes |
| 1519 | KWPWYIWLGF | S | 1211 | 1220 | Yes |
| 1520 | FIAGLIAIV | S | 1220 | 1228 | Yes |
| 1521 | SEPVLKGVKL | S | 1261 | 1270 | Yes |

•CD8S (ND) = 144 (Table 3). CD8S (ND) Megapool

| SEQ ID NO: | Description | Antigen | Start | End | Dominant |
|---|---|---|---|---|---|
| 1522 | FVFLVLLPL | S | 2 | 10 | No |
| 1523 | LPLVSSQCV | S | 8 | 16 | No |
| 1524 | TRTQLPPAY | S | 20 | 28 | No |
| 1525 | LPPAYTNSF | S | 24 | 32 | No |
| 1526 | NSFTRGVYY | S | 30 | 38 | No |
| 1527 | GVYYPDKVFR | S | 35 | 44 | No |
| 1528 | KVFRSSVLH | S | 41 | 49 | No |
| 1529 | FRSSVLHST | S | 43 | 51 | No |
| 1530 | STQDLFLPF | S | 50 | 58 | No |
| 1531 | TQDLFLPFF | S | 51 | 59 | No |
| 1532 | FLPFFSNVTW | S | 55 | 64 | No |
| 1533 | PFFSNVTWF | S | 57 | 65 | No |
| 1534 | HVSGTNGTK | S | 69 | 77 | No |
| 1535 | LPFNDGVYF | S | 84 | 92 | No |
| 1536 | DGVYFASTEK | S | 88 | 97 | No |
| 1537 | WIFGTTLDSK | S | 104 | 113 | No |
| 1538 | CNDPFLGVY | S | 136 | 144 | No |
| 1539 | GVYYHKNNK | S | 142 | 150 | No |
| 1540 | YYHKNNKSW | S | 144 | 152 | No |
| 1541 | SWMESEFRV | S | 151 | 159 | No |
| 1542 | SWMESEFRVY | S | 151 | 160 | No |
| 1543 | VYSSANNCTF | S | 159 | 168 | No |
| 1544 | SANNCTFEY | S | 162 | 170 | No |
| 1545 | FEYVSQPFLM | S | 168 | 177 | No |
| 1546 | EYVSQPFLM | S | 169 | 177 | No |
| 1547 | FKNLREFVF | S | 186 | 194 | No |
| 1548 | VFKNIDGYF | S | 193 | 201 | No |
| 1549 | KIYSKHTPI | S | 202 | 210 | No |
| 1550 | LEPLVDLPI | S | 223 | 231 | No |
| 1551 | LPIGINITRF | S | 229 | 238 | No |
| 1552 | INITRFQTL | S | 233 | 241 | No |
| 1553 | GAAAYYVGY | S | 261 | 269 | No |
| 1554 | VGYLQPRTFL | S | 267 | 276 | No |
| 1555 | GYLQPRTFLL | S | 268 | 277 | No |
| 1556 | CALDPLSETK | S | 291 | 300 | No |
| 1557 | ALDPLSETK | S | 292 | 300 | No |
| 1558 | SETKCTLKSF | S | 297 | 306 | No |
| 1559 | ETKCTLKSF | S | 298 | 306 | No |
| 1560 | IYQTSNFRV | S | 312 | 320 | No |
| 1561 | QPTESIVRF | S | 321 | 329 | No |
| 1562 | GEVFNATRF | S | 339 | 347 | No |
| 1563 | NATRFASVY | S | 343 | 351 | No |
| 1564 | TRFASVYAW | S | 345 | 353 | No |
| 1565 | RFASVYAWNR | S | 346 | 355 | No |
| 1566 | FASVYAWNR | S | 347 | 355 | No |
| 1567 | SVYAWNRKR | S | 349 | 357 | No |
| 1568 | NSASFSTFK | S | 370 | 378 | No |
| 1569 | SASFSTFKCY | S | 371 | 380 | No |
| 1570 | KLNDLCFTNV | S | 386 | 395 | No |
| 1571 | NVYADSFVIR | S | 394 | 403 | No |
| 1572 | FVIRGDEVR | S | 400 | 408 | No |
| 1573 | QIAPGQTGK | S | 409 | 417 | No |
| 1574 | DSKVGGNYNY | S | 442 | 451 | No |
| 1575 | KVGGNYNYLY | S | 444 | 453 | No |
| 1576 | VGGNYNYLY | S | 445 | 453 | No |
| 1577 | GNYNYLYRLF | S | 447 | 456 | No |
| 1578 | YNYL YRLFR | S | 449 | 457 | No |
| 1579 | RLFRKSNLK | S | 454 | 462 | No |
| 1580 | KSNLKPFER | S | 458 | 466 | No |
| 1581 | FERDISTEI | S | 464 | 472 | No |
| 1582 | FERDISTEIY | S | 464 | 473 | No |
| 1583 | NGVEGENCY | S | 481 | 489 | No |
| 1584 | YGFQPTNGV | S | 495 | 503 | No |
| 1585 | VGYQPYRVV | S | 503 | 511 | No |
| 1586 | YQPYRVVVL | S | 505 | 513 | No |
| 1587 | QPYRVVVLSF | S | 506 | 515 | No |
| 1588 | FELLHAPATV | S | 515 | 524 | No |
| 1589 | ELLHAPATV | S | 516 | 524 | No |
| 1590 | LVKNKCVNF | S | 533 | 541 | No |
| 1591 | VLTESNKKF | S | 551 | 559 | No |
| 1592 | KFLPFQQFGR | S | 558 | 567 | No |
| 1593 | DAVRDPQTL | S | 574 | 582 | No |
| 1594 | TPCSFGGVSV | S | 588 | 597 | No |
| 1595 | NTSNQVAVLY | S | 603 | 612 | No |
| 1596 | TSNQVAVLY | S | 604 | 612 | No |
| 1597 | YQDVNCTEV | S | 612 | 620 | No |
| 1598 | IHADQLTPTW | S | 624 | 633 | No |
| 1599 | QLTPTWRVY | S | 628 | 636 | No |
| 1600 | RVYSTGSNV | S | 634 | 642 | No |
| 1601 | RVYSTGSNVF | S | 634 | 643 | No |
| 1602 | STGSNVFQTR | S | 637 | 646 | No |
| 1603 | QTNSPRRAR | S | 677 | 685 | No |
| 1604 | RSVASQSII | S | 685 | 693 | No |
| 1605 | LGAENSVAY | S | 699 | 707 | No |
| 1606 | AYSNNSIAI | S | 706 | 714 | No |
| 1607 | NSIAIPTNF | S | 710 | 718 | No |
| 1608 | IAIPTNFTI | S | 712 | 720 | No |
| 1609 | IPTNFTISV | S | 714 | 722 | No |
| 1610 | FTISVTTEI | S | 718 | 726 | No |
| 1611 | EILPVSMTK | S | 725 | 733 | No |
| 1612 | KTSVDCTMYI | S | 733 | 742 | No |
| 1613 | GSFCTQLNR | S | 757 | 765 | No |
| 1614 | TQLNRALTGI | S | 761 | 770 | No |
| 1615 | EVFAQVKQI | S | 780 | 788 | No |
| 1616 | EVFAQVKQIY | S | 780 | 789 | No |
| 1617 | VFAQVKQIY | S | 781 | 789 | No |
| 1618 | IYKTPPIKDF | S | 788 | 797 | No |
| 1619 | ILPDPSKPSK | S | 805 | 814 | No |
| 1620 | TLADAGFIK | S | 827 | 835 | No |
| 1621 | LADAGFIKQY | S | 828 | 837 | No |
| 1622 | ADAGFIKQY | S | 829 | 837 | No |
| 1623 | GLTVLPPLL | S | 857 | 865 | No |
| 1624 | LPPLLTDEM | S | 861 | 869 | No |
| 1625 | LLTDEMIAQY | S | 864 | 873 | No |
| 1626 | LTDEMIAQYT | S | 865 | 874 | No |
| 1627 | WTFGAGAAL | S | 886 | 894 | No |
| 1628 | QIPFAMQMAY | S | 895 | 904 | No |
| 1629 | IPFAMQMAY | S | 896 | 904 | No |
| 1630 | FAMQMAYRF | S | 898 | 906 | No |
| 1631 | IANQFNSAI | S | 923 | 931 | No |
| 1632 | LSSTASALGK | S | 938 | 947 | No |
| 1633 | ALNTL VKQL | S | 958 | 966 | No |
| 1634 | SVLNDILSR | S | 975 | 983 | No |
| 1635 | SVLNDILSRL | S | 975 | 984 | No |
| 1636 | AEVQIDRLI | S | 989 | 997 | No |
| 1637 | LITGRLQSL | S | 997 | 1005 | No |
| 1638 | AEIRASANL | S | 1016 | 1024 | No |
| 1639 | RASANLAATK | S | 1019 | 1028 | No |
| 1640 | RVDFCGKGY | S | 1039 | 1047 | No |
| 1641 | FPQSAPHGV | S | 1052 | 1060 | No |
| 1642 | QSAPHGVVF | S | 1054 | 1062 | No |
| 1643 | GVVFLHVTY | S | 1059 | 1067 | No |
| 1644 | HVTYVPAQEK | S | 1064 | 1073 | No |
| 1645 | VTYVPAQEK | S | 1065 | 1073 | No |
| 1646 | GVFVSNGTHW | S | 1093 | 1102 | No |
| 1647 | VFVSNGTHW | S | 1094 | 1102 | No |
| 1648 | VFVSNGTHWF | S | 1094 | 1103 | No |
| 1649 | FVSNGTHWF | S | 1095 | 1103 | No |
| 1650 | HWFVTQRNF | S | 1101 | 1109 | No |
| 1651 | WFVTQRNFY | S | 1102 | 1110 | No |
| 1652 | IITTDNTFV | S | 1114 | 1122 | No |
| 1653 | DSFKEELDKY | S | 1146 | 1155 | No |
| 1654 | SFKEELDKY | S | 1147 | 1155 | No |
| 1655 | NASVVNIQK | S | 1173 | 1181 | No |
| 1656 | KEIDRLNEV | S | 1181 | 1189 | No |
| 1657 | NESLIDLQEL | S | 1194 | 1203 | No |
| 1658 | LQELGKYEQY | S | 1200 | 1209 | No |
| 1659 | QELGKYEQY | S | 1201 | 1209 | No |
| 1660 | YEQYIKWPW | S | 1206 | 1214 | No |
| 1661 | QYIKWPWYIW | S | 1208 | 1217 | No |
| 1662 | CMTSCCSCLK | S | 1236 | 1245 | No |
| 1663 | FDEDDSEPVL | S | 1256 | 1265 | No |
| 1664 | EPVLKGVKL | S | 1262 | 1270 | No |
| 1665 | VLKGVKLHY | S | 1264 | 1272 | No |

•CD8R (D) = 153 (Table 4). CD8R (D) Megapool

| SEQ ID NO: | Description | Antigen | Start | End | Dominant |
|---|---|---|---|---|---|
| 1666 | SLVKPSFYV | E | 50 | 58 | Yes |
| 1667 | YVYSRVKNL | E | 57 | 65 | Yes |
| 1668 | GTITVEELK | M | 6 | 14 | Yes |
| 1669 | KLLEQWNLV | M | 15 | 23 | Yes |
| 1670 | FLFLTWICL | M | 26 | 34 | Yes |
| 1671 | NRFLYIIKL | M | 43 | 51 | Yes |
| 1672 | TLACFVLAAV | M | 61 | 70 | Yes |
| 1673 | FVLAAVYRI | M | 65 | 73 | Yes |
| 1674 | RLFARTRSMW | M | 101 | 110 | Yes |
| 1675 | SMWSFNPET | M | 108 | 116 | Yes |
| 1676 | SELVIGAVIL | M | 136 | 145 | Yes |
| 1677 | AVILRGHLR | M | 142 | 150 | Yes |
| 1678 | ATSRTLSYY | M | 171 | 179 | Yes |
| 1679 | ATSRTLSYYK | M | 171 | 180 | Yes |
| 1680 | RYRIGNYKL | M | 198 | 206 | Yes |
| 1681 | QRNAPRITF | N | 9 | 17 | Yes |
| 1682 | NTASWFTAL | N | 48 | 56 | Yes |
| 1683 | KFPRGQGVPI | N | 65 | 74 | Yes |
| 1684 | FPRGQGVPI | N | 66 | 74 | Yes |
| 1685 | YYRRATRRIR | N | 86 | 95 | Yes |
| 1686 | RIRGGDGKMK | N | 93 | 102 | Yes |
| 1687 | KMKDLSPRW | N | 100 | 108 | Yes |
| 1688 | LSPRWYFYYL | N | 104 | 113 | Yes |
| 1689 | SPRWYFYYL | N | 105 | 113 | Yes |
| 1690 | GTGPEAGLPY | N | 114 | 123 | Yes |
| 1691 | ATEGALNTPK | N | 134 | 143 | Yes |
| 1692 | NPANNAAIVL | N | 150 | 159 | Yes |
| 1693 | VLQLPQGTTL | N | 158 | 167 | Yes |
| 1694 | LALLLLDRL | N | 219 | 227 | Yes |
| 1695 | LLLLDRLNQL | N | 221 | 230 | Yes |
| 1696 | LLLDRLNQL | N | 222 | 230 | Yes |
| 1697 | QQQQGQTVTK | N | 239 | 248 | Yes |
| 1698 | KPRQKRTAT | N | 257 | 265 | Yes |
| 1699 | KAYNVTQAF | N | 266 | 274 | Yes |
| 1700 | AQFAPSASA | N | 305 | 313 | Yes |
| 1701 | AQFAPSASAF | N | 305 | 314 | Yes |
| 1702 | ASAFFGMSR | N | 311 | 319 | Yes |
| 1703 | GMSRIGMEV | N | 316 | 324 | Yes |
| 1704 | MEVTPSGTW | N | 322 | 330 | Yes |
| 1705 | MEVTPSGTWL | N | 322 | 331 | Yes |
| 1706 | ILLNKHIDA | N | 351 | 359 | Yes |
| 1707 | KTFPPTEPK | N | 361 | 369 | Yes |
| 1708 | KTFPPTEPKK | N | 361 | 370 | Yes |
| 1709 | LPAADLDDF | N | 395 | 403 | Yes |
| 1710 | FSKQLQQSM | N | 403 | 411 | Yes |
| 1711 | VLSEARQHL | NSP1 | 38 | 46 | Yes |
| 1712 | TVLSFCAFAV | NSP10 | 12 | 21 | Yes |
| 1713 | DLKGKYVQI | NSP10 | 91 | 99 | Yes |
| 1714 | YTMADLVYAL | NSP12 | 122 | 131 | Yes |
| 1715 | TMADLVYAL | NSP12 | 123 | 131 | Yes |
| 1716 | LLMPILTLT | NSP12 | 240 | 248 | Yes |
| 1717 | KLFDRYFKY | NSP12 | 281 | 289 | Yes |
| 1718 | FVDGVPFVV | NSP12 | 334 | 342 | Yes |
| 1719 | ISDYDYYRY | NSP12 | 450 | 458 | Yes |
| 1720 | RQLLFVVEV | NSP12 | 467 | 475 | Yes |
| 1721 | VVDKYFDCY | NSP12 | 475 | 483 | Yes |
| 1722 | RLYYDSMSY | NSP12 | 513 | 521 | Yes |
| 1723 | MVMCGGSLYV | NSP12 | 666 | 675 | Yes |
| 1724 | DTDFVNEFY | NSP12 | 738 | 746 | Yes |
| 1725 | FYAYLRKHF | NSP12 | 745 | 753 | Yes |
| 1726 | RILGAGCFV | NSP12 | 836 | 844 | Yes |
| 1727 | LMIERFVSL | NSP12 | 854 | 862 | Yes |
| 1728 | LYLQYIRKL | NSP12 | 883 | 891 | Yes |
| 1729 | VLQAVGACV | NSP13 | −2 | 6 | Yes |
| 1730 | LVLSVNPYV | NSP13 | 41 | 49 | Yes |
| 1731 | KLFAAETLK | NSP13 | 131 | 139 | Yes |
| 1732 | KLSYGIATV | NSP13 | 146 | 154 | Yes |
| 1733 | VVYRGTTTY | NSP13 | 209 | 217 | Yes |
| 1734 | VVYRGTTTYK | NSP13 | 209 | 218 | Yes |
| 1735 | VYRGTTTYKL | NSP13 | 210 | 219 | Yes |
| 1736 | KLNVGDYFV | NSP13 | 218 | 226 | Yes |
| 1737 | SSNVANYQK | NSP13 | 263 | 271 | Yes |
| 1738 | VYIGDPAQL | NSP13 | 397 | 405 | Yes |
| 1739 | IVDTVSALV | NSP13 | 448 | 456 | Yes |
| 1740 | IPRRNVATL | NSP13 | 592 | 600 | Yes |
| 1741 | VLWAHGFEL | NSP14 | 184 | 192 | Yes |
| 1742 | TYACWHHSI | NSP14 | 223 | 231 | Yes |
| 1743 | AIMTRCLAV | NSP14 | 274 | 282 | Yes |
| 1744 | IEYPIIGDEL | NSP14 | 294 | 303 | Yes |
| 1745 | ALLADKFPV | NSP14 | 320 | 328 | Yes |
| 1746 | SYATHSDKF | NSP14 | 369 | 377 | Yes |
| 1747 | YLDAYNMMI | NSP14 | 494 | 502 | Yes |
| 1748 | MMISAGFSL | NSP14 | 500 | 508 | Yes |
| 1749 | KQFDTYNLW | NSP14 | 512 | 520 | Yes |
| 1750 | NLWNTFTRL | NSP14 | 518 | 526 | Yes |
| 1751 | KVDGVDVEL | NSP15 | 34 | 42 | Yes |
| 1752 | LLLDDFVEII | NSP15 | 297 | 306 | Yes |
| 1753 | MLWCKDGHV | NSP15 | 330 | 338 | Yes |
| 1754 | GVAMPNLYK | NSP16 | 8 | 16 | Yes |
| 1755 | KMQRMLLEK | NSP16 | 16 | 24 | Yes |
| 1756 | YLNTLTLAV | NSP16 | 53 | 61 | Yes |
| 1757 | TLIGDCATV | NSP16 | 110 | 118 | Yes |
| 1758 | KTIQPRVEK | NSP2 | 102 | 110 | Yes |
| 1759 | KLVNKFLAL | NSP2 | 500 | 508 | Yes |
| 1760 | VTNNTFTLK | NSP2 | 628 | 636 | Yes |
| 1761 | FGDDTVIEV | NSP3 | 7 | 15 | Yes |
| 1762 | PTDNYITTY | NSP3 | 503 | 511 | Yes |
| 1763 | QEILGTVSW | NSP3 | 547 | 555 | Yes |
| 1764 | TTDPSFLGRY | NSP3 | 819 | 828 | Yes |
| 1765 | YLATALLTL | NSP3 | 857 | 865 | Yes |
| 1766 | SAPPAQYEL | NSP3 | 990 | 998 | Yes |
| 1767 | NYMPYFFTL | NSP3 | 1349 | 1357 | Yes |
| 1768 | ASMPTTIAK | NSP3 | 1374 | 1382 | Yes |
| 1769 | ILFTRFFYV | NSP3 | 1514 | 1522 | Yes |
| 1770 | YIFFASFYY | NSP3 | 1566 | 1574 | Yes |
| 1771 | QLMCQPILLL | NSP3 | 1745 | 1754 | Yes |
| 1772 | STFNVPMEK | NSP3 | 1782 | 1790 | Yes |
| 1773 | FLPRVFSAV | NSP4 | 121 | 129 | Yes |
| 1774 | FSAVGNICY | NSP4 | 126 | 134 | Yes |
| 1775 | SLRPDTRYVL | NSP4 | 184 | 193 | Yes |
| 1776 | FLLNKEMYL | NSP4 | 420 | 428 | Yes |
| 1777 | TSEDMLNPNY | NSP5 | 45 | 54 | Yes |
| 1778 | TPKYKFVRI | NSP5 | 98 | 106 | Yes |
| 1779 | VRIQPGQTF | NSP5 | 104 | 112 | Yes |
| 1780 | FLNGSCGSV | NSP5 | 140 | 148 | Yes |
| 1781 | GTDLEGNFY | NSP5 | 174 | 182 | Yes |
| 1782 | VLAWLYAAV | NSP5 | 204 | 212 | Yes |
| 1783 | FLNRFTTTL | NSP5 | 219 | 227 | Yes |
| 1784 | SAFAMMFVK | NSP6 | 53 | 61 | Yes |
| 1785 | FLLPSLATV | NSP6 | 70 | 78 | Yes |
| 1786 | MPASWVMRI | NSP6 | 86 | 94 | Yes |
| 1787 | KLKDCVMYA | NSP6 | 109 | 117 | Yes |
| 1788 | SMWALIISV | NSP6 | 163 | 171 | Yes |
| 1789 | KLWAQCVQL | NSP7 | 27 | 35 | Yes |
| 1790 | SEFSSLPSY | NSP8 | 4 | 12 | Yes |
| 1791 | NTCDGTTFTY | NSP8 | 140 | 149 | Yes |
| 1792 | FTYASALWEI | NSP8 | 147 | 156 | Yes |
| 1793 | SALWEIQQVV | NSP8 | 151 | 160 | Yes |
| 1794 | ALWEIQQVV | NSP8 | 152 | 160 | Yes |
| 1795 | ALRANSAVK | NSP8 | 188 | 196 | Yes |
| 1796 | CTDDNALAY | NSP9 | 23 | 31 | Yes |
| 1797 | CTDDNALAYY | NSP9 | 23 | 32 | Yes |
| 1798 | YTELEPPCRF | NSP9 | 66 | 75 | Yes |
| 1799 | VTDTPKGPK | NSP9 | 76 | 84 | Yes |
| 1800 | MDLFMRIFTI | ORF3a | 1 | 10 | Yes |
| 1801 | FVRATATIPI | ORF3a | 28 | 37 | Yes |
| 1802 | IPIQASLPF | ORF3a | 35 | 43 | Yes |
| 1803 | IVGVALLAVF | ORF3a | 47 | 56 | Yes |
| 1804 | ALSKGVHFV | ORF3a | 72 | 80 | Yes |
| 1805 | YLYALVYFL | ORF3a | 107 | 115 | Yes |
| 1806 | VYFLQSINF | ORF3a | 112 | 120 | Yes |
| 1807 | LLYDANYFL | ORF3a | 139 | 147 | Yes |
| 1808 | FTSDYYQLY | ORF3a | 207 | 215 | Yes |
| 1809 | YYQLYSTQL | ORF3a | 211 | 219 | Yes |
| 1810 | HLVDFQVTI | ORF6 | 3 | 11 | Yes |
| 1811 | QLRARSVSPK | ORF7a | 76 | 85 | Yes |
| 1812 | RARSVSPKL | ORF7a | 78 | 86 | Yes |
| 1813 | KLFIRQEEV | ORF7a | 85 | 93 | Yes |
| 1814 | VFITLCFTLK | ORF7a | 108 | 117 | Yes |
| 1815 | IMLIIFWFSL | ORF7b | 23 | 32 | Yes |
| 1816 | IQYIDIGNY | ORF8 | 71 | 79 | Yes |
| 1817 | KLGSLVVRC | ORF8 | 94 | 102 | Yes |
| 1818 | LEYHDVRVVL | ORF8 | 109 | 118 | Yes |

•CD8 (ND) = 468 (Table 5). CD8R (ND) Megapool

| SEQ ID NO: | Description | Antigen | Start | End | Dominant |
|---|---|---|---|---|---|
| 1819 | SEETGTLIV | E | 6 | 14 | No |
| 1820 | FLLVTLAIL | E | 26 | 34 | No |
| 1821 | LVKPSFYVY | E | 51 | 59 | No |
| 1822 | FYVYSRVKNL | E | 56 | 65 | No |
| 1823 | NGTITVEELK | M | 5 | 14 | No |
| 1824 | WICLLQFAY | M | 31 | 39 | No |
| 1825 | FAYANRNRF | M | 37 | 45 | No |
| 1826 | AYANRNRFL | M | 38 | 46 | No |
| 1827 | YANRNRFLY | M | 39 | 47 | No |
| 1828 | ANRNRFLYI | M | 40 | 48 | No |
| 1829 | RNRFLYIIK | M | 42 | 50 | No |
| 1830 | RNRFLYIIKL | M | 42 | 51 | No |
| 1831 | RFLYIIKLIF | M | 44 | 53 | No |
| 1832 | FLWLLWPVTL | M | 53 | 62 | No |
| 1833 | WLLWPVTLA | M | 55 | 63 | No |
| 1834 | LLWPVTLAC | M | 56 | 64 | No |
| 1835 | LAAVYRINW | M | 67 | 75 | No |
| 1836 | LAAVYRINWI | M | 67 | 76 | No |
| 1837 | MACLVGLMW | M | 84 | 92 | No |
| 1838 | GLMWLSYFI | M | 89 | 97 | No |
| 1839 | LSYFIASFR | M | 93 | 101 | No |
| 1840 | IASFRLFAR | M | 97 | 105 | No |
| 1841 | FRLFARTRSM | M | 100 | 109 | No |
| 1842 | RLFARTRSM | M | 101 | 109 | No |
| 1843 | SFNPETNIL | M | 111 | 119 | No |
| 1844 | SELVIGAVI | M | 136 | 144 | No |
| 1845 | ELVIGAVILR | M | 137 | 146 | No |
| 1846 | LVIGAVILR | M | 138 | 146 | No |
| 1847 | HLRIAGHHL | M | 148 | 156 | No |
| 1848 | RIAGHHLGR | M | 150 | 158 | No |
| 1849 | LPKEITVAT | M | 164 | 172 | No |
| 1850 | TVATSRTLSY | M | 169 | 178 | No |
| 1851 | VATSRTLSY | M | 170 | 178 | No |
| 1852 | VATSRTLSYY | M | 170 | 179 | No |
| 1853 | SQRVAGDSGF | M | 184 | 193 | No |
| 1854 | AGDSGFAAY | M | 188 | 196 | No |
| 1855 | DSGFAAYSR | M | 190 | 198 | No |
| 1856 | YSRYRIGNYK | M | 196 | 205 | No |
| 1857 | SSSDNIALL | M | 212 | 220 | No |
| 1858 | RPQGLPNNTA | N | 41 | 50 | No |
| 1859 | QGLPNNTASW | N | 43 | 52 | No |
| 1860 | LPNNTASWF | N | 45 | 53 | No |
| 1861 | SPDDQIGYY | N | 79 | 87 | No |
| 1862 | MKDLSPRWY | N | 101 | 109 | No |
| 1863 | YLGTGPEAGL | N | 112 | 121 | No |
| 1864 | AGLPYGANK | N | 119 | 127 | No |
| 1865 | LPYGANKDGI | N | 121 | 130 | No |
| 1866 | YGANKDGIIW | N | 123 | 132 | No |
| 1867 | IIWVATEGA | N | 130 | 138 | No |
| 1868 | GTRNPANNA | N | 147 | 155 | No |
| 1869 | AEGSRGGSQA | N | 173 | 182 | No |
| 1870 | SQASSRSSSR | N | 180 | 189 | No |
| 1871 | SSRGTSPAR | N | 201 | 209 | No |
| 1872 | KSAAEASKK | N | 249 | 257 | No |
| 1873 | RTATKAYNV | N | 262 | 270 | No |
| 1874 | QELIRQGTDY | N | 289 | 298 | No |
| 1875 | ELIRQGTDY | N | 290 | 298 | No |
| 1876 | QFAPSASAFF | N | 306 | 315 | No |
| 1877 | FAPSASAFF | N | 307 | 315 | No |
| 1878 | APSASAFFGM | N | 308 | 317 | No |
| 1879 | SASAFFGMSR | N | 310 | 319 | No |
| 1880 | VTPSGTWLTY | N | 324 | 333 | No |
| 1881 | TPSGTWLTY | N | 325 | 333 | No |
| 1882 | KLDDKDPNF | N | 338 | 346 | No |
| 1883 | LLNKHIDAY | N | 352 | 360 | No |
| 1884 | YKTFPPTEPK | N | 360 | 369 | No |
| 1885 | KKQQTVTLL | N | 387 | 395 | No |
| 1886 | HLKDGTCGL | NSP1 | 45 | 53 | No |
| 1887 | APHGHVMVEL | NSP1 | 79 | 88 | No |
| 1888 | VMVELVAEL | NSP1 | 84 | 92 | No |
| 1889 | VPHVGEIPV | NSP1 | 108 | 116 | No |
| 1890 | HVGEIPVAY | NSP1 | 110 | 118 | No |
| 1891 | IPVAYRKVLL | NSP1 | 114 | 123 | No |
| 1892 | VPANSTVLSF | NSP10 | 7 | 16 | No |
| 1893 | YLASGGQPI | NSP10 | 30 | 38 | No |
| 1894 | VVYRAFDIY | NSP12 | 30 | 38 | No |
| 1895 | KVAGFAKFL | NSP12 | 41 | 49 | No |
| 1896 | KVAGFAKFLK | NSP12 | 41 | 50 | No |
| 1897 | NLIDSYFVV | NSP12 | 64 | 72 | No |
| 1898 | YFVVKRHTF | NSP12 | 69 | 77 | No |
| 1899 | VPHISRQRL | NSP12 | 111 | 119 | No |
| 1900 | TLKEILVTY | NSP12 | 141 | 149 | No |
| 1901 | FVENPDILRV | NSP12 | 165 | 174 | No |
| 1902 | VENPDILRV | NSP12 | 166 | 174 | No |
| 1903 | VENPDILRVY | NSP12 | 166 | 175 | No |
| 1904 | VRQALLKTV | NSP12 | 182 | 190 | No |
| 1905 | DAMRNAGIV | NSP12 | 194 | 202 | No |
| 1906 | SLLMPILTL | NSP12 | 239 | 247 | No |
| 1907 | HVDTDLTKPY | NSP12 | 256 | 265 | No |
| 1908 | KPYIKWDLL | NSP12 | 263 | 271 | No |
| 1909 | RYFKYWDQTY | NSP12 | 285 | 294 | No |
| 1910 | ILHCANFNV | NSP12 | 307 | 315 | No |
| 1911 | STVFPPTSF | NSP12 | 318 | 326 | No |
| 1912 | FPPTSFGPL | NSP12 | 321 | 329 | No |
| 1913 | TSFGPLVRK | NSP12 | 324 | 332 | No |
| 1914 | SFGPLVRKI | NSP12 | 325 | 333 | No |
| 1915 | KIFVDGVPFV | NSP12 | 332 | 341 | No |
| 1916 | FVVSTGYHFR | NSP12 | 340 | 349 | No |
| 1917 | VVSTGYHFR | NSP12 | 341 | 349 | No |
| 1918 | NLHSSRLSF | NSP12 | 360 | 368 | No |
| 1919 | QTVKPGNFNK | NSP12 | 408 | 417 | No |
| 1920 | FAVSKGFFK | NSP12 | 422 | 430 | No |
| 1921 | AAISDYDYY | NSP12 | 448 | 456 | No |
| 1922 | AAISDYDYYR | NSP12 | 448 | 457 | No |
| 1923 | AISDYDYYR | NSP12 | 449 | 457 | No |
| 1924 | YRYNLPTMC | NSP12 | 456 | 464 | No |
| 1925 | FVVEVVDKY | NSP12 | 47 | 479 | No |
| 1926 | KSAGFPFNK | NSP12 | 500 | 508 | No |
| 1927 | KSAGFPFNKW | NSP12 | 500 | 509 | No |
| 1928 | ARLYYDSMSY | NSP12 | 512 | 521 | No |
| 1929 | FAYTKRNVI | NSP12 | 528 | 536 | No |
| 1930 | NVIPTITQM | NSP12 | 534 | 542 | No |
| 1931 | IPTITQMNL | NSP12 | 536 | 544 | No |
| 1932 | TITQMNLKY | NSP12 | 538 | 546 | No |
| 1933 | YAISAKNRAR | NSP12 | 546 | 555 | No |
| 1934 | SAKNRARTV | NSP12 | 549 | 557 | No |
| 1935 | SICSTMTNR | NSP12 | 561 | 569 | No |
| 1936 | IAATRGATV | NSP12 | 579 | 587 | No |
| 1937 | ATVVIGTSK | NSP12 | 585 | 593 | No |
| 1938 | VENPHLMGWD | NSP12 | 609 | 618 | No |
| 1939 | NMLRIMASL | NSP12 | 628 | 636 | No |
| 1940 | LRIMASLVL | NSP12 | 630 | 638 | No |
| 1941 | IMASLVLAR | NSP12 | 632 | 640 | No |
| 1942 | MASLVLARK | NSP12 | 633 | 641 | No |
| 1943 | RLANECAQV | NSP12 | 654 | 662 | No |
| 1944 | TSSGDATTAY | NSP12 | 680 | 689 | No |
| 1945 | VRNLQHRLY | NSP12 | 720 | 728 | No |
| 1946 | FVNEFYAYL | NSP12 | 741 | 749 | No |
| 1947 | FVNEFYAYLR | NSP12 | 741 | 750 | No |
| 1948 | LRKHFSMMI | NSP12 | 749 | 757 | No |
| 1949 | LYYQNNVFM | NSP12 | 786 | 794 | No |
| 1950 | LVKQGDDYVY | NSP12 | 819 | 828 | No |
| 1951 | KQGDDYVYL | NSP12 | 821 | 829 | No |
| 1952 | YLPYPDPSRI | NSP12 | 828 | 837 | No |
| 1953 | LPYPDPSRIL | NSP12 | 829 | 838 | No |
| 1954 | QEYADVFHLY | NSP12 | 875 | 884 | No |
| 1955 | YADVFHLYL | NSP12 | 877 | 885 | No |
| 1956 | LTNDNTSRYW | NSP12 | 907 | 916 | No |
| 1957 | WEPEFYEAM | NSP12 | 916 | 924 | No |
| 1958 | AMYTPHTVL | NSP12 | 923 | 931 | No |
| 1959 | TPHTVLQAV | NSP12 | 926 | 934 | No |
| 1960 | QLYLGGMSYY | NSP13 | 62 | 71 | No |
| 1961 | YRGTTTYKL | NSP13 | 21. | 219 | No |
| 1962 | TLVPQEHYV | NSP13 | 239 | 247 | No |
| 1963 | VPQEHYVRI | NSP13 | 241 | 249 | No |
| 1964 | YQKVGMQKY | NSP13 | 269 | 277 | No |
| 1965 | FAIGLALYY | NSP13 | 291 | 299 | No |
| 1966 | YYPSARIVY | NSP13 | 298 | 306 | No |
| 1967 | IPARARVEC | NSP13 | 334 | 342 | No |
| 1968 | IPARARVECF | NSP13 | 334 | 343 | No |
| 1969 | YVFCTVNAL | NSP13 | 355 | 363 | No |
| 1970 | VVNARLRAK | NSP13 | 386 | 394 | No |
| 1971 | RPQIGVVREF | NSP13 | 490 | 499 | No |
| 1972 | AVASKILGL | NSP13 | 520 | 528 | No |
| 1973 | ILGLPTQTV | NSP13 | 525 | 533 | No |
| 1974 | EEAIRHVRAW | NSP14 | 77 | 86 | No |
| 1975 | LQLGFSTGV | NSP14 | 107 | 115 | No |
| 1976 | MYKGLPWNV | NSP14 | 153 | 161 | No |
| 1977 | KNLSDRVVFV | NSP14 | 175 | 184 | No |
| 1978 | PFMIDVQQW | NSP14 | 239 | 247 | No |
| 1979 | LLADKFPVL | NSP14 | 321 | 329 | No |
| 1980 | YKIEELFYSY | NSP14 | 361 | 370 | No |
| 1981 | KIEELFYSY | NSP14 | 362 | 370 | No |
| 1982 | FTDGVCLFW | NSP14 | 377 | 385 | No |
| 1983 | SLYVNKHAF | NSP14 | 418 | 426 | No |
| 1984 | AGFSLWVYK | NSP14 | 504 | 512 | No |
| 1985 | YNLWNTFTRL | NSP14 | 517 | 526 | No |
| 1986 | NTFTRLQSL | NSP14 | 521 | 529 | No |
| 1987 | SLENVAFNV | NSP15 | 1 | 9 | No |
| 1988 | TTLPVNVAF | NSP15 | 47 | 55 | No |
| 1989 | TICAPLTVF | NSP15 | 114 | 122 | No |
| 1990 | GRVDGQVDL | NSP15 | 125 | 133 | No |
| 1991 | KVDGVVQQL | NSP15 | 181 | 189 | No |
| 1992 | VVQQLPETY | NSP15 | 185 | 193 | No |
| 1993 | KPRSQMEIDF | NSP15 | 204 | 213 | No |
| 1994 | FIERYKLEGY | NSP15 | 221 | 230 | No |
| 1995 | LLLDDFVEI | NSP15 | 297 | 305 | No |
| 1996 | SVVSKVVKV | NSP15 | 312 | 320 | No |
| 1997 | VAMPNLYKM | NSP16 | 9 | 17 | No |
| 1998 | LPKGIMMNV | NSP16 | 36 | 44 | No |
| 1999 | CATVHTANKW | NSP16 | 115 | 124 | No |
| 2000 | KLMGHFAWW | NSP16 | 182 | 190 | No |
| 2001 | YVMHANYIF | NSP16 | 222 | 230 | No |
| 2002 | FWRNTNPIQL | NSP16 | 230 | 239 | No |
| 2003 | WRNTNPIQL | NSP16 | 231 | 239 | No |
| 2004 | NPIQLSSYSL | NSP16 | 235 | 244 | No |
| 2005 | SYSLFDMSKF | NSP16 | 241 | 250 | No |
| 2006 | FPLKLRGTA | NSP16 | 250 | 258 | No |
| 2007 | FPLKLRGTAV | NSP16 | 250 | 259 | No |
| 2008 | LRGTAVMSL | NSP16 | 254 | 262 | No |
| 2009 | TFNGECPNF | NSP2 | 85 | 93 | No |
| 2010 | GFMGRIRSV | NSP2 | 115 | 123 | No |
| 2011 | EEIAIILASF | NSP2 | 291 | 300 | No |
| 2012 | ILSPLYAFA | NSP2 | 349 | 357 | No |
| 2013 | VRSIFSRTL | NSP2 | 364 | 372 | No |
| 2014 | ITILDGISQY | NSP2 | 387 | 396 | No |
| 2015 | RLIDAMMFT | NSP2 | 399 | 407 | No |
| 2016 | TVYEKLKPV | NSP2 | 439 | 447 | No |
| 2017 | EIKESVQTF | NSP2 | 490 | 498 | No |
| 2018 | GETLPTEVL | NSP2 | 564 | 572 | No |
| 2019 | DTVIEVQGYK | NSP3 | 10 | 19 | No |
| 2020 | QGYKSVNITF | NSP3 | 16 | 25 | No |
| 2021 | FELDERIDKV | NSP3 | 25 | 34 | No |
| 2022 | ELDERIDKV | NSP3 | 26 | 34 | No |
| 2023 | VLNEKCSAY | NSP3 | 34 | 42 | No |
| 2024 | VELGTEVNEF | NSP3 | 44 | 53 | No |
| 2025 | SELLTPLGI | NSP3 | 69 | 77 | No |
| 2026 | YLFDESGEF | NSP3 | 88 | 96 | No |
| 2027 | FEPSTQYEY | NSP3 | 123 | 131 | No |
| 2028 | DDYQGKPLEF | NSP3 | 135 | 144 | No |
| 2029 | LEFGATSAAL | NSP3 | 142 | 151 | No |
| 2030 | VEVQPQLEM | NSP3 | 188 | 196 | No |
| 2031 | LEMELTPVV | NSP3 | 194 | 202 | No |
| 2032 | MELTPVVQTI | NSP3 | 196 | 205 | No |
| 2033 | TPVVQTIEV | NSP3 | 199 | 207 | No |
| 2034 | TIEVNSFSGY | NSP3 | 204 | 213 | No |
| 2035 | IEVNSFSGY | NSP3 | 205 | 213 | No |
| 2036 | NSFSGYLKL | NSP3 | 208 | 216 | No |
| 2037 | YLKLTDNVY | NSP3 | 213 | 221 | No |
| 2038 | EAKKVKPTV | NSP3 | 230 | 238 | No |
| 2039 | VVVNAANVY | NSP3 | 238 | 246 | No |
| 2040 | YIATNGPLK | NSP3 | 272 | 280 | No |
| 2041 | YENFNQHEV | NSP3 | 317 | 325 | No |
| 2042 | LLSAGIFGA | NSP3 | 330 | 338 | No |
| 2043 | GADPIHSLR | NSP3 | 337 | 345 | No |
| 2044 | RTNVYLAVF | NSP3 | 352 | 360 | No |
| 2045 | AVFDKNLYDK | NSP3 | 358 | 367 | No |
| 2046 | LYDKLVSSF | NSP3 | 364 | 372 | No |
| 2047 | KLVSSFLEM | NSP3 | 367 | 375 | No |
| 2048 | KIAEIPKEEV | NSP3 | 384 | 393 | No |
| 2049 | EVKPFITESK | NSP3 | 392 | 401 | No |
| 2050 | ESKPSVEQR | NSP3 | 399 | 407 | No |
| 2051 | FLTENLLLYI | NSP3 | 430 | 439 | No |
| 2052 | LVSDIDITF | NSP3 | 452 | 460 | No |
| 2053 | APYIVGDVV | NSP3 | 465 | 473 | No |
| 2054 | LTAVVIPTK | NSP3 | 478 | 486 | No |
| 2055 | ALRKVPTDNY | NSP3 | 498 | 507 | No |
| 2056 | KQEILGTVSW | NSP3 | 546 | 555 | No |
| 2057 | MLAHAEETR | NSP3 | 560 | 568 | No |
| 2058 | AHAEETRKL | NSP3 | 562 | 570 | No |
| 2059 | KLMPVCVET | NSP3 | 569 | 577 | No |
| 2060 | AIVSTIQRK | NSP3 | 579 | 587 | No |
| 2061 | VVDYGARFY | NSP3 | 597 | 605 | No |
| 2062 | SLINTLNDL | NSP3 | 615 | 623 | No |
| 2063 | VSSPDAVTAY | NSP3 | 659 | 668 | No |
| 2064 | TISLAGSYK | NSP3 | 686 | 694 | No |
| 2065 | ISLAGSYKDW | NSP3 | 687 | 696 | No |
| 2066 | YYTSNPTTF | NSP3 | 718 | 726 | No |
| 2067 | TSNPTTFHL | NSP3 | 720 | 728 | No |
| 2068 | HLDGEVITF | NSP3 | 727 | 735 | No |
| 2069 | GEVITFDNL | NSP3 | 730 | 738 | No |
| 2070 | ITFDNLKTL | NSP3 | 733 | 741 | No |
| 2071 | RTIKVFTTV | NSP3 | 748 | 756 | No |
| 2072 | NINLHTQVV | NSP3 | 758 | 766 | No |
| 2073 | QVVDMSMTY | NSP3 | 764 | 772 | No |
| 2074 | MSMTYGQQF | NSP3 | 768 | 776 | No |
| 2075 | LRVEAFEYY | NSP3 | 809 | 817 | No |
| 2076 | HTTDPSFLGR | NSP3 | 818 | 827 | No |
| 2077 | FLGRYMSAL | NSP3 | 824 | 832 | No |
| 2078 | YMSALNHTK | NSP3 | 828 | 836 | No |
| 2079 | MSALNHTKK | NSP3 | 829 | 837 | No |
| 2080 | MSALNHTKKW | NSP3 | 829 | 838 | No |
| 2081 | SALNHTKKW | NSP3 | 830 | 838 | No |
| 2082 | WKYPQVNGL | NSP3 | 838 | 846 | No |
| 2083 | YPQVNGLTSI | NSP3 | 840 | 849 | No |
| 2084 | ARAGEAANF | NSP3 | 884 | 892 | No |
| 2085 | GEAANFCAL | NSP3 | 887 | 895 | No |
| 2086 | LGDVRETMSY | NSP3 | 907 | 916 | No |
| 2087 | VRETMSYLF | NSP3 | 910 | 918 | No |
| 2088 | VMYMGTLSY | NSP3 | 950 | 958 | No |
| 2089 | YTGNYQCGHY | NSP3 | 1009 | 1018 | No |
| 2090 | DVFYKENSY | NSP3 | 1047 | 1055 | No |
| 2091 | YTTTIKPVTY | NSP3 | 1055 | 1064 | No |
| 2092 | EIDPKLDNY | NSP3 | 1073 | 1081 | No |
| 2093 | NYYKKDNSY | NSP3 | 1080 | 1088 | No |
| 2094 | YYKKDNSYF | NSP3 | 1081 | 1089 | No |
| 2095 | ASFDNFKFV | NSP3 | 1105 | 1113 | No |
| 2096 | KFADDLNQL | NSP3 | 1118 | 1126 | No |
| 2097 | ASRELKVTF | NSP3 | 1133 | 1141 | No |
| 2098 | DVVAIDYKHY | NSP3 | 1148 | 1157 | No |
| 2099 | VVAIDYKHY | NSP3 | 1149 | 1157 | No |
| 2100 | DYKHYTPSF | NSP3 | 1153 | 1161 | No |
| 2101 | LHKPIVWHV | NSP3 | 1168 | 1176 | No |
| 2102 | NKATYKPNTW | NSP3 | 1181 | 1190 | No |
| 2103 | SEDAQGMDNL | NSP3 | 1212 | 1221 | No |
| 2104 | EEVVENPTI | NSP3 | 1231 | 1239 | No |
| 2105 | TEVVGDIIL | NSP3 | 1251 | 1259 | No |
| 2106 | AYVDNSSLTI | NSP3 | 1280 | 1289 | No |
| 2107 | LTIKKPNEL | NSP3 | 1287 | 1295 | No |
| 2108 | KPNELSRVL | NSP3 | 1291 | 1299 | No |
| 2109 | NELSRVLGL | NSP3 | 1293 | 1301 | No |
| 2110 | SRVLGLKTL | NSP3 | 1296 | 1304 | No |
| 2111 | SVPWDTIANY | NSP3 | 1314 | 1323 | No |
| 2112 | DTIANYAKPF | NSP3 | 1318 | 1327 | No |
| 2113 | YAKPFLNKV | NSP3 | 1323 | 1331 | No |
| 2114 | RIKASMPTT | NSP3 | 1371 | 1379 | No |
| 2115 | KASMPTTIA | NSP3 | 1373 | 1381 | No |
| 2116 | MPTTIAKNTV | NSP3 | 1376 | 1385 | No |
| 2117 | TTIAKNTVK | NSP3 | 1378 | 1386 | No |
| 2118 | NTVKSVGKF | NSP3 | 1383 | 1391 | No |
| 2119 | KFCLEASFNY | NSP3 | 1390 | 1399 | No |
| 2120 | CLEASFNYL | NSP3 | 1392 | 1400 | No |
| 2121 | KLINIIIWF | NSP3 | 1407 | 1415 | No |
| 2122 | SLIYSTAAL | NSP3 | 1424 | 1432 | No |
| 2123 | STAALGVLM | NSP3 | 1428 | 1436 | No |
| 2124 | MSNLGMPSY | NSP3 | 1436 | 1444 | No |
| 2125 | EGYLNSTNV | NSP3 | 1450 | 1458 | No |
| 2126 | NSTNVTIATY | NSP3 | 1454 | 1463 | No |
| 2127 | STNVTIATY | NSP3 | 1455 | 1463 | No |
| 2128 | ETIQITISSF | NSP3 | 1487 | 1496 | No |
| 2129 | IQITISSFK | NSP3 | 1489 | 1497 | No |
| 2130 | LTAFGLVAEW | NSP3 | 1500 | 1509 | No |
| 2131 | LVAEWFLAY | NSP3 | 1505 | 1513 | No |
| 2132 | AEWFLAYIL | NSP3 | 1507 | 1515 | No |
| 2133 | AEWFLAYILF | NSP3 | 1507 | 1516 | No |
| 2134 | AYILFTRFF | NSP3 | 1512 | 1520 | No |
| 2135 | AVHFISNSW | NSP3 | 1537 | 1545 | No |
| 2136 | HFISNSWLMW | NSP3 | 1539 | 1548 | No |
| 2137 | WLMWLIINL | NSP3 | 1545 | 1553 | No |
| 2138 | LVQMAPISAM | NSP3 | 1553 | 1562 | No |
| 2139 | SAMVRMYIF | NSP3 | 1560 | 1568 | No |
| 2140 | RMYIFFASFY | NSP3 | 1564 | 1573 | No |
| 2141 | SFYYVWKSY | NSP3 | 1571 | 1579 | No |
| 2142 | FYYVWKSYV | NSP3 | 1572 | 1580 | No |
| 2143 | YVYANGGKGF | NSP3 | 1617 | 1626 | No |
| 2144 | DTFCAGSTF | NSP3 | 1638 | 1646 | No |
| 2145 | EVARDLSLQF | NSP3 | 1650 | 1659 | No |
| 2146 | VARDLSLQF | NSP3 | 1651 | 1659 | No |
| 2147 | TVKNGSIHLY | NSP3 | 1677 | 1686 | No |
| 2148 | VKNGSIHLY | NSP3 | 1678 | 1686 | No |
| 2149 | YFDKAGQKTY | NSP3 | 1686 | 1695 | No |
| 2150 | TYERHSLSHF | NSP3 | 1694 | 1703 | No |
| 2151 | YERHSLSHF | NSP3 | 1695 | 1703 | No |
| 2152 | ERHSLSHFV | NSP3 | 1696 | 1704 | No |
| 2153 | SSAKSASVY | NSP3 | 1734 | 1742 | No |
| 2154 | SAKSASVYY | NSP3 | 1735 | 1743 | No |
| 2155 | DSAEVAVKM | NSP3 | 1764 | 1772 | No |
| 2156 | EVAVKMFDAY | NSP3 | 1767 | 1776 | No |
| 2157 | KMFDAYVNTF | NSP3 | 1771 | 1780 | No |
| 2158 | MFDAYVNTF | NSP3 | 1772 | 1780 | No |
| 2159 | AYVNTFSSTF | NSP3 | 1775 | 1784 | No |
| 2160 | YVNTFSSTF | NSP3 | 1776 | 1784 | No |
| 2161 | VPMEKLKTL | NSP3 | 1786 | 1794 | No |
| 2162 | AEAELAKNV | NSP3 | 1798 | 1806 | No |
| 2163 | AELAKNVSL | NSP3 | 1800 | 1808 | No |
| 2164 | SLDNVLSTF | NSP3 | 1807 | 1815 | No |
| 2165 | TFISAARQGF | NSP3 | 1814 | 1823 | No |
| 2166 | DSCNNYMLTY | NSP3 | 1850 | 1859 | No |
| 2167 | VENMTPRDL | NSP3 | 1862 | 1870 | No |
| 2168 | TPRDLGACI | NSP3 | 1866 | 1874 | No |
| 2169 | VAKSHNIAL | NSP3 | 1885 | 1893 | No |
| 2170 | AKSHNIALIW | NSP3 | 1886 | 1895 | No |
| 2171 | QVVNVVTTK | NSP3 | 1931 | 1939 | No |
| 2172 | VVTTKIALK | NSP3 | 1935 | 1943 | No |
| 2173 | KQLIKVTLVF | NSP4 | 8 | 17 | No |
| 2174 | FYLITPVHV | NSP4 | 24 | 32 | No |
| 2175 | YLITPVHVM | NSP4 | 25 | 33 | No |
| 2176 | SEIIGYKAI | NSP4 | 41 | 49 | No |
| 2177 | IAAVITREV | NSP4 | 91 | 99 | No |
| 2178 | FVVPGLPGT | NSP4 | 101 | 109 | No |
| 2179 | VPGLPGTIL | NSP4 | 103 | 111 | No |
| 2180 | RTTNGDFLHF | NSP4 | 112 | 121 | No |
| 2181 | VLAAECTIF | NSP4 | 151 | 159 | No |
| 2182 | DASGKPVPY | NSP4 | 161 | 169 | No |
| 2183 | TNVLEGSVAY | NSP4 | 173 | 182 | No |
| 2184 | GSVAYESLR | NSP4 | 178 | 186 | No |
| 2185 | RPDTRYVLM | NSP4 | 186 | 194 | No |
| 2186 | SIIQFPNTY | NSP4 | 197 | 205 | No |
| 2187 | WVLNNDYYR | NSP4 | 241 | 249 | No |
| 2188 | SLPGVFCGV | NSP4 | 250 | 258 | No |
| 2189 | DAVNLLTNM | NSP4 | 259 | 267 | No |
| 2190 | IVAGGIVAI | NSP4 | 284 | 292 | No |
| 2191 | LAYYFMRFR | NSP4 | 297 | 305 | No |
| 2192 | YFMRFRRAF | NSP4 | 300 | 308 | No |
| 2193 | FGEYSHVVAF | NSP4 | 308 | 317 | No |
| 2194 | SFLPGVYSV | NSP4 | 336 | 344 | No |
| 2195 | IYLYLTFYL | NSP4 | 345 | 353 | No |
| 2196 | YLTNDVSFLA | NSP4 | 352 | 361 | No |
| 2197 | FLAHIQWMV | NSP4 | 359 | 367 | No |
| 2198 | MFTPLVPFW | NSP4 | 368 | 376 | No |
| 2199 | VPFWITIAY | NSP4 | 373 | 381 | No |
| 2200 | WFFSNYLKR | NSP4 | 392 | 400 | No |
| 2201 | DVLLPLTQY | NSP4 | 433 | 441 | No |
| 2202 | LPLTQYNRY | NSP4 | 436 | 444 | No |
| 2203 | GAMDTTSYR | NSP4 | 456 | 464 | No |
| 2204 | SNSGSDVLY | NSP4 | 479 | 487 | No |
| 2205 | LYQPPQTSI | NSP4 | 486 | 494 | No |
| 2206 | AVLQSGFRK | NSP5 | -3 | 5 | No |
| 2207 | TANPKTPKY | NSP5 | 93 | 101 | No |
| 2208 | NPKTPKYKF | NSP5 | 95 | 103 | No |
| 2209 | IQPGQTFSV | NSP5 | 106 | 114 | No |
| 2210 | QPGQTFSVL | NSP5 | 107 | 115 | No |
| 2211 | SPSGVYQCAM | NSP5 | 121 | 130 | No |
| 2212 | ILTSLLVLV | NSP6 | 18 | 26 | No |
| 2213 | FLYENAFLP | NSP6 | 36 | 44 | No |
| 2214 | LPFAMGIIAM | NSP6 | 43 | 52 | No |
| 2215 | MFVKHKHAF | NSP6 | 58 | 66 | No |
| 2216 | FVKHKHAFL | NSP6 | 59 | 67 | No |
| 2217 | LFLLPSLATV | NSP6 | 69 | 78 | No |
| 2218 | FLLPSLATVA | NSP6 | 70 | 79 | No |
| 2219 | VYMPASWVM | NSP6 | 84 | 92 | No |
| 2220 | RIMTWLDMV | NSP6 | 93 | 101 | No |
| 2221 | WLDMVDTSL | NSP6 | 97 | 105 | No |
| 2222 | VMYASAVVLL | NSP6 | 114 | 123 | No |
| 2223 | MYASAVVLL | NSP6 | 115 | 123 | No |
| 2224 | YASAVVLLI | NSP6 | 116 | 124 | No |
| 2225 | TLMNVLTLV | NSP6 | 141 | 149 | No |
| 2226 | FLARGIVFM | NSP6 | 184 | 192 | No |
| 2227 | IFFITGNTL | NSP6 | 199 | 207 | No |
| 2228 | GVYDYLVST | NSP6 | 240 | 248 | No |
| 2229 | YDYLVSTQEF | NSP6 | 242 | 251 | No |
| 2230 | FRYMNSQGL | NSP6 | 251 | 259 | No |
| 2231 | GLLPPKNSI | NSP6 | 258 | 266 | No |
| 2232 | KLNIKLLGV | NSP6 | 270 | 278 | No |
| 2233 | EAFEKMVSL | NSP7 | 47 | 55 | No |
| 2234 | SLLSVLLSM | NSP7 | 54 | 62 | No |
| 2235 | TFTYASALW | NSP8 | 146 | 154 | No |
| 2236 | AWPLIVTAL | NSP8 | 181 | 189 | No |
| 2237 | GPKVKYLYF | NSP9 | 82 | 90 | No |
| 2238 | YFIKGLNNL | NSP9 | 89 | 97 | No |
| 2239 | YINVFAFPF | ORF10 | 3 | 11 | No |
| 2240 | NVFAFPFTI | ORF10 | 5 | 13 | No |
| 2241 | FTIGTVTLK | ORF3a | 8 | 16 | No |
| 2242 | ATIPIQASL | ORF3a | 33 | 41 | No |
| 2243 | ALLAVFQSA | ORF3a | 51 | 59 | No |
| 2244 | QSASKIITL | ORF3a | 57 | 65 | No |
| 2245 | SASKIITLK | ORF3a | 58 | 66 | No |
| 2246 | ITLKKRWQL | ORF3a | 63 | 71 | No |
| 2247 | TLKKRWQLA | ORF3a | 64 | 72 | No |
| 2248 | NLLLLFVTV | ORF3a | 82 | 90 | No |
| 2249 | FVTVYSHLL | ORF3a | 87 | 95 | No |
| 2250 | TVYSHLLLV | ORF3a | 89 | 97 | No |
| 2251 | VAAGLEAPF | ORF3a | 97 | 105 | No |
| 2252 | AAGLEAPFLY | ORF3a | 98 | 107 | No |
| 2253 | AGLEAPFLY | ORF3a | 99 | 107 | No |
| 2254 | GLEAPFLYL | ORF3a | 100 | 108 | No |
| 2255 | LEAPFLYLY | ORF3a | 101 | 109 | No |
| 2256 | APFLYLY AL | ORF3a | 103 | 111 | No |
| 2257 | FLYLYALVY | ORF3a | 105 | 113 | No |
| 2258 | LYLYALVYF | ORF3a | 106 | 114 | No |
| 2259 | FVRIIMRLW | ORF3a | 120 | 128 | No |
| 2260 | VRIIMRLWL | ORF3a | 121 | 129 | No |
| 2261 | CRSKNPLLY | ORF3a | 133 | 141 | No |
| 2262 | NPLLYDANY | ORF3a | 137 | 145 | No |
| 2263 | IPYNSVTSSI | ORF3a | 158 | 167 | No |
| 2264 | TTSPISEHDY | ORF3a | 175 | 184 | No |
| 2265 | HSYFTSDYY | ORF3a | 204 | 212 | No |
| 2266 | YFTSDYYQL | ORF3a | 206 | 214 | No |
| 2267 | YFTSDYYQLY | ORF3a | 206 | 215 | No |
| 2268 | DYYQLYSTQL | ORF3a | 210 | 219 | No |
| 2269 | HVTFFIYNK | ORF3a | 227 | 235 | No |
| 2270 | EEHVQIHTI | ORF3a | 241 | 249 | No |
| 2271 | IYDEPTTTT | ORF3a | 263 | 271 | No |
| 2272 | HLVDFQVTIA | ORF6 | 3 | 12 | No |
| 2273 | VTIAEILLI | ORF6 | 9 | 17 | No |
| 2274 | LIIMRTFKV | ORF6 | 16 | 24 | No |
| 2275 | TFKVSIWNL | ORF6 | 21 | 29 | No |
| 2276 | LDYIINLII | ORF6 | 29 | 37 | No |
| 2277 | QECVRGTTVL | ORF7a | 21 | 30 | No |
| 2278 | YEGNSPFHPL | ORF7a | 40 | 49 | No |
| 2279 | EGNSPFHPL | ORF7a | 41 | 49 | No |
| 2280 | HPLADNKFAL | ORF7a | 47 | 56 | No |
| 2281 | SPIFLIVAA | ORF7a | 98 | 106 | No |
| 2282 | QSCTQHQPY | ORF8 | 23 | 31 | No |
| 2283 | VDDPCPIHFY | ORF8 | 33 | 42 | No |
| 2284 | RVGARKSAPL | ORF8 | 48 | 57 | No |
| 2285 | EPKLGSLVV | ORF8 | 92 | 100 | No |
| 2286 | EYHDVRVVL | ORF8 | 110 | 118 | No |

•CD4R* (D) = 69 (Table 6). CD4R (D) Megapool

| SEQ ID NO: | Description | Antigen | Start | End | Dominant |
|---|---|---|---|---|---|
| 2287 | FYVYSRVKNLNSSRV | E | 56 | 70 | Yes |
| 2288 | QFAYANRNRFLYIIK | M | 36 | 50 | Yes |
| 2289 | VLAAVYRINWITGGI | M | 66 | 80 | Yes |
| 2290 | YRINWITGGIAIAMA | M | 71 | 85 | Yes |
| 2291 | CLVGLMWLSYFIASF | M | 86 | 100 | Yes |
| 2292 | MWLSYFIASFRLFAR | M | 91 | 105 | Yes |
| 2293 | TNILLNVPLHGTILT | M | 116 | 130 | Yes |
| 2294 | SELVIGAVILRGHLR | M | 136 | 150 | Yes |
| 2295 | GAVILRGHLRIAGHHLGR | M | 141 | 158 | Yes |
| 2296 | LRGHLRIAGHHLGRC | M | 145 | 159 | Yes |
| 2297 | RGHLRIAGHHLGRCD | M | 146 | 160 | Yes |
| 2298 | IAGHHLGRCDIKDLP | M | 151 | 165 | Yes |
| 2299 | LGRCDIKDLPKEITV | M | 156 | 170 | Yes |
| 2300 | IKDLPKEITVATSRT | M | 161 | 175 | Yes |
| 2301 | KEITVATSRTLSYYK | M | 166 | 180 | Yes |
| 2302 | TSRTLSYYKLGASQRVA | M | 172 | 188 | Yes |
| 2303 | SRTLSYYKLGASQRV | M | 173 | 187 | Yes |
| 2304 | LSYYKLGASQRVAGD | M | 176 | 190 | Yes |
| 2305 | SYYKLGASQRVAGDS | M | 177 | 191 | Yes |
| 2306 | LGASQRVAGDSGFAA | M | 181 | 195 | Yes |
| 2307 | SGFAAYSRYRIGNYK | M | 191 | 205 | Yes |
| 2308 | ASWFTALTQHGKEDL | N | 50 | 64 | Yes |
| 2309 | SWFTALTQHGKEDLK | N | 51 | 65 | Yes |
| 2310 | DDQIGYYRRATRRIR | N | 81 | 95 | Yes |
| 2311 | IGYYRRATRRIRGGD | N | 84 | 98 | Yes |
| 2312 | YYRRATRRIRGGDGK | N | 86 | 100 | Yes |
| 2313 | MKDLSPRWYFYYLGT | N | 101 | 115 | Yes |
| 2314 | RWYFYYLGTGPEAGL | N | 107 | 121 | Yes |
| 2315 | NKDGIIWVATEGALN | N | 126 | 140 | Yes |
| 2316 | KDGIIWVATEGALNT | N | 127 | 141 | Yes |
| 2317 | AIVLQLPQGTTLPKG | N | 156 | 170 | Yes |
| 2318 | AGNGGDAALALLLLD | N | 211 | 225 | Yes |
| 2319 | DAALALLLLDRLNQL | N | 216 | 230 | Yes |
| 2320 | LLLLDRLNQLESKMS | N | 221 | 235 | Yes |
| 2321 | AAEASKKPRQKRTAT | N | 251 | 265 | Yes |
| 2322 | KKPRQKRTATKAYNV | N | 256 | 270 | Yes |
| 2323 | KRTATKAYNVTQAFG | N | 261 | 275 | Yes |
| 2324 | KAYNVTQAFGRRGPE | N | 266 | 280 | Yes |
| 2325 | LIRQGTDYKHWPQIA | N | 291 | 305 | Yes |
| 2326 | YKHWPQIAQFAPSAS | N | 298 | 312 | Yes |
| 2327 | WPQIAQFAPSASAFF | N | 301 | 315 | Yes |
| 2328 | ASAFFGMSRIGMEVT | N | 311 | 325 | Yes |
| 2329 | GMEVTPSGTWLTYTGAIKLD | N | 321 | 340 | Yes |
| 2330 | PSGTWLTYTGAIKLD | N | 326 | 340 | Yes |
| 2331 | GTWLTYTGAIKLDDK | N | 328 | 342 | Yes |
| 2332 | FKDQVILLNKHIDAY | N | 346 | 360 | Yes |
| 2333 | ILLNKHIDAYKTFPP | N | 351 | 365 | Yes |
| 2334 | LMIERFVSLAIDAYP | NSP12 | 854 | 868 | Yes |
| 2335 | LDDFVEIIKSQDLSV | NSP15 | 299 | 313 | Yes |
| 2336 | KVTFFPDLNGDVVAI | NSP3 | 1138 | 1152 | Yes |
| 2337 | KHFYWFFSNYLKRRV | NSP4 | 388 | 402 | Yes |
| 2338 | NRYFRLTLGVYDYLV | NSP6 | 232 | 246 | Yes |
| 2339 | INVFAFPFTIYSLLL | ORF10 | 4 | 18 | Yes |
| 2340 | FMRIFTIGTVTLKQG | ORF3a | 4 | 18 | Yes |
| 2341 | KKRWQLALSKGVHFV | ORF3a | 66 | 80 | Yes |
| 2342 | LYLYALVYFLQSINF | ORF3a | 106 | 120 | Yes |
| 2343 | QSINFVRIIMRLWLC | ORF3a | 116 | 130 | Yes |
| 2344 | IWNLDYIINLIIKNL | ORF6 | 26 | 40 | Yes |
| 2345 | QEEVQELYSPIFLIV | ORF7a | 90 | 104 | Yes |
| 2346 | TQHQPYVVDDPCPIH | ORF8 | 26 | 40 | Yes |
| 2347 | YVVDDPCPIHFYSKW | ORF8 | 31 | 45 | Yes |
| 2348 | PCPIHFYSKWYIRVG | ORF8 | 36 | 50 | Yes |
| 2349 | FYSKWYIRVGARKSA | ORF8 | 41 | 55 | Yes |
| 2350 | SKWYIRVGARKSAPL | ORF8 | 43 | 57 | Yes |
| 2351 | YIRVGARKSAPLIEL | ORF8 | 46 | 60 | Yes |
| 2352 | IGNYTVSCLPFTINC | ORF8 | 76 | 90 | Yes |
| 2353 | FTINCQEPKLGSLVV | ORF8 | 86 | 100 | Yes |
| 2354 | GSLVVRCSFYEDFLE | ORF8 | 96 | 110 | Yes |
| 2355 | RCSFYEDFLEYHDVR | ORF8 | 101 | 115 | Yes |

•CD4R* (ND)= 215 (Table 7). CD4R (ND) Megapool

| SEQ ID NO: | Description | Antigen | Start | End | Dominant |
|---|---|---|---|---|---|
| 2356 | SEETGTLIVNSVLLF | E | 6 | 20 | No |
| 2357 | FLLVTLAILTALRLC | E | 26 | 40 | No |
| 2358 | LAILTALRLCAYCCN | E | 31 | 45 | No |
| 2359 | EELKKLLEQWNLVIG | M | 11 | 25 | No |
| 2360 | LLEQWNLVIGFLFLT | M | 16 | 30 | No |
| 2361 | NLVIGFLFLTWICLL | M | 21 | 35 | No |
| 2362 | FLFLTWICLLQFAYA | M | 26 | 40 | No |
| 2363 | WICLLQFAYANRNRF | M | 31 | 45 | No |
| 2364 | NRNRFLYIIKLIFLW | M | 41 | 55 | No |
| 2365 | LYIIKLIFLWLLWPV | M | 46 | 60 | No |
| 2366 | LIFLWLLWPVTLACF | M | 51 | 65 | No |
| 2367 | LLWPVTLACFVLAAV | M | 56 | 70 | No |
| 2368 | ITGGIAIAMACLVGL | M | 76 | 90 | No |
| 2369 | AIAMACLVGLMWLSY | M | 81 | 95 | No |
| 2370 | FIASFRLFARTRSMW | M | 96 | 110 | No |
| 2371 | RLFARTRSMWSFNPE | M | 101 | 115 | No |
| 2372 | TRSMWSFNPETNILL | M | 106 | 120 | No |
| 2373 | SFNPETNILLNVPLH | M | 111 | 125 | No |
| 2374 | NVPLHGTILTRPLLE | M | 121 | 135 | No |
| 2375 | GTILTRPLLESELVI | M | 126 | 140 | No |
| 2376 | RPLLESELVIGAVIL | M | 131 | 145 | No |
| 2377 | GAVILRGHLRIAGHH | M | 141 | 155 | No |
| 2378 | LRIAGHHLGRCDIKD | M | 149 | 163 | No |
| 2379 | ATSRTLSYYKLGASQ | M | 171 | 185 | No |
| 2380 | RVAGDSGFAAYSRYR | M | 186 | 200 | No |
| 2381 | YSRYRIGNYKLNTDH | M | 196 | 210 | No |
| 2382 | IGNYKLNTDHSSSSD | M | 201 | 215 | No |
| 2383 | LNTDHSSSSDNIALL | M | 206 | 220 | No |
| 2384 | PQNQRNAPRITFGGP | N | 6 | 20 | No |
| 2385 | NAPRITFGGPSDSTG | N | 11 | 25 | No |
| 2386 | TFGGPSDSTGSNQNG | N | 16 | 30 | No |
| 2387 | LTQHGKEDLKFPRGQ | N | 56 | 70 | No |
| 2388 | FPRGQGVPINTNSSP | N | 66 | 80 | No |
| 2389 | GVPINTNSSPDDQIG | N | 71 | 85 | No |
| 2390 | TRRIRGGDGKMKDLS | N | 91 | 105 | No |
| 2391 | GGDGKMKDLSPRWYF | N | 96 | 110 | No |
| 2392 | MKDLSPRWYFYYLGTGPEAG | N | 101 | 120 | No |
| 2393 | PRWYFYYLGTGPEAG | N | 106 | 120 | No |
| 2394 | LPYGANKDGIIWVAT | N | 121 | 135 | No |
| 2395 | IWVATEGALNTPKDH | N | 131 | 145 | No |
| 2396 | EGALNTPKDHIGTRN | N | 136 | 150 | No |
| 2397 | GKGQQQQGQTVTKKS | N | 236 | 250 | No |
| 2398 | KPRQKRTATKAYNVT | N | 257 | 271 | No |
| 2399 | TQAFGRRGPEQTQGN | N | 271 | 285 | No |
| 2400 | RRGPEQTQGNFGDQE | N | 276 | 290 | No |
| 2401 | FGDQELIRQGTDYKH | N | 286 | 300 | No |
| 2402 | TDYKHWPQIAQFAPS | N | 296 | 310 | No |
| 2403 | QFAPSASAFFGMSRI | N | 306 | 320 | No |
| 2404 | AFFGMSRIGMEVTPS | N | 313 | 327 | No |
| 2405 | GMEVTPSGTWLTYTG | N | 321 | 335 | No |
| 2406 | TWLTYTGAIKLDDKDPNF | N | 329 | 346 | No |
| 2407 | LTYTGAIKLDDKDPN | N | 331 | 345 | No |
| 2408 | AIKLDDKDPNFKDQV | N | 336 | 350 | No |
| 2409 | PNFKDQVILLNKHIDAYK | N | 344 | 361 | No |
| 2410 | HIDAYKTFPPTEPKK | N | 356 | 370 | No |
| 2411 | QKKQQTVTLLPAADL | N | 386 | 400 | No |
| 2412 | KQQTVTLLPAADLDDF | N | 388 | 403 | No |
| 2413 | TVTLLPAADLDDFSK | N | 391 | 405 | No |
| 2414 | AADLDDFSKQLQQSM | N | 397 | 411 | No |
| 2415 | VLSFCAFAVDAAKAY | NSP10 | 13 | 27 | No |
| 2416 | PDILRVYANLGERVR | NSP12 | 169 | 183 | No |
| 2417 | SLLMPILTLTRALTA | NSP12 | 239 | 253 | No |
| 2418 | HCANFNVLFSTVFPP | NSP12 | 309 | 323 | No |
| 2419 | NVLFSTVFPPTSFGP | NSP12 | 314 | 328 | No |
| 2420 | QDALFAYTKRNVIPT | NSP12 | 524 | 538 | No |
| 2421 | KLLKSIAATRGATVV | NSP12 | 574 | 588 | No |
| 2422 | IAATRGATVVIGTSK | NSP12 | 579 | 593 | No |
| 2423 | YPKCDRAMPNMLRIM | NSP12 | 619 | 633 | No |
| 2424 | RAMPNMLRIMASLVL | NSP12 | 624 | 638 | No |
| 2425 | SHRFYRLANECAQVL | NSP12 | 649 | 663 | No |
| 2426 | SEMVMCGGSLYVKPG | NSP12 | 664 | 678 | No |
| 2427 | FNICQAVTANVNALL | NSP12 | 694 | 708 | No |
| 2428 | AVTANVNALLSTDGN | NSP12 | 699 | 713 | No |
| 2429 | EFYAYLRKHFSMMIL | NSP12 | 744 | 758 | No |
| 2430 | LRKHFSMMILSDDAV | NSP12 | 749 | 763 | No |
| 2431 | GLVASIKNFKSVLYY | NSP12 | 774 | 788 | No |
| 2432 | KTDGTLMIERFVSLA | NSP12 | 849 | 863 | No |
| 2433 | FVSLAIDAYPLTKHP | NSP12 | 859 | 873 | No |
| 2434 | IDAYPLTKHPNQEYA | NSP12 | 864 | 878 | No |
| 2435 | DVFHLYLQYIRKLHD | NSP12 | 879 | 893 | No |
| 2436 | TSHKLVLSVNPYVCN | NSP13 | 37 | 51 | No |
| 2437 | ELHLSWEVGKPRPPL | NSP13 | 162 | 176 | No |
| 2438 | PRPPLNRNYVFTGYR | NSP13 | 172 | 186 | No |
| 2439 | FTGYRVTKNSKVQIG | NSP13 | 182 | 196 | No |
| 2440 | VTKNSKVQIGEYTFE | NSP13 | 187 | 201 | No |
| 2441 | VNARLRAKHYVYIGD | NSP13 | 387 | 401 | No |
| 2442 | ISPYNSQNAVASKIL | NSP13 | 512 | 526 | No |
| 2443 | NVNRFNVAITRAKVG | NSP13 | 557 | 571 | No |
| 2444 | NMFITREEAIRHVRA | NSP14 | 71 | 85 | No |
| 2445 | REEAIRHVRAWIGFD | NSP14 | 76 | 90 | No |
| 2446 | PLMYKGLPWNVVRIK | NSP14 | 151 | 165 | No |
| 2447 | EIIKSQDLSVVSKVV | NSP15 | 304 | 318 | No |
| 2448 | TQLCQYLNTLTLAVP | NSP16 | 48 | 62 | No |
| 2449 | AVMSLKEGQINDMIL | NSP16 | 258 | 272 | No |
| 2450 | KEGQINDMILSLLSK | NSP16 | 263 | 277 | No |
| 2451 | RENNRVVISSDVLVN | NSP16 | 283 | 297 | No |
| 2452 | PLNSIIKTIQPRVEK | NSP2 | 96 | 110 | No |
| 2453 | EEIAIILASFSASTS | NSP2 | 291 | 305 | No |
| 2454 | SPLYAFASEAARVVR | NSP2 | 351 | 365 | No |
| 2455 | AITILDGISQYSLRL | NSP2 | 386 | 400 | No |
| 2456 | QTFFKLVNKFLALCA | NSP2 | 496 | 510 | No |
| 2457 | GETFVTHSKGLYRKC | NSP2 | 526 | 540 | No |
| 2458 | ADAVIKTLQPVSELL | NSP3 | 58 | 72 | No |
| 2459 | ESDDYIATNGPLKVG | NSP3 | 268 | 282 | No |
| 2460 | IATNGPLKVGGSCVL | NSP3 | 273 | 287 | No |
| 2461 | SGHNLAKHCLHVVGP | NSP3 | 288 | 302 | No |
| 2462 | NLYDKLVSSFLEMKS | NSP3 | 363 | 377 | No |
| 2463 | ENLLLYIDINGNLHP | NSP3 | 433 | 447 | No |
| 2464 | KSAFYILPSIISNEK | NSP3 | 532 | 546 | No |
| 2465 | RFYFYTSKTTVASLI | NSP3 | 603 | 617 | No |
| 2466 | EAARYMRSLKVPATV | NSP3 | 643 | 657 | No |
| 2467 | LPNDDTLRVEAFEYY | NSP3 | 803 | 817 | No |
| 2468 | TLRVEAFEYYHTTDP | NSP3 | 808 | 822 | No |
| 2469 | HTTDPSFLGRYMSAL | NSP3 | 818 | 832 | No |
| 2470 | SFLGRYMSALNHTKK | NSP3 | 823 | 837 | No |
| 2471 | YMSALNHTKKWKYPQ | NSP3 | 828 | 842 | No |
| 2472 | NHTKKWKYPQVNGLT | NSP3 | 833 | 847 | No |
| 2473 | ESPFVMMSAPPAQYE | NSP3 | 983 | 997 | No |
| 2474 | YCIDGALLTKSSEYK | NSP3 | 1028 | 1042 | No |
| 2475 | DNFKFVCDNIKFADD | NSP3 | 1108 | 1122 | No |
| 2476 | LNQLTGYKKPASREL | NSP3 | 1123 | 1137 | No |
| 2477 | GYKKPASRELKVTFF | NSP3 | 1128 | 1142 | No |
| 2478 | ASRELKVTFFPDLNG | NSP3 | 1133 | 1147 | No |
| 2479 | PDLNGDVVAIDYKHY | NSP3 | 1143 | 1157 | No |
| 2480 | TPSFKKGAKLLHKPI | NSP3 | 1158 | 1172 | No |
| 2481 | VWHVNNATNKATYKP | NSP3 | 1173 | 1187 | No |
| 2482 | MAAYVDNSSLTIKKP | NSP3 | 1278 | 1292 | No |
| 2483 | NELSRVLGLKTLATH | NSP3 | 1293 | 1307 | No |
| 2484 | TFTRSTNSRIKASMP | NSP3 | 1363 | 1377 | No |
| 2485 | TNSRIKASMPTTIAK | NSP3 | 1368 | 1382 | No |
| 2486 | NTVKSVGKFCLEASF | NSP3 | 1383 | 1397 | No |
| 2487 | LEASFNYLKSPNFSK | NSP3 | 1393 | 1407 | No |
| 2488 | PNFSKLINIIIWFLL | NSP3 | 1403 | 1417 | No |
| 2489 | GSLIYSTAALGVLMS | NSP3 | 1423 | 1437 | No |
| 2490 | ISSFKWDLTAFGLVA | NSP3 | 1493 | 1507 | No |
| 2491 | WDLTAFGLVAEWFLA | NSP3 | 1498 | 1512 | No |
| 2492 | FGLVAEWFLAYILFT | NSP3 | 1503 | 1517 | No |
| 2493 | FDAYVNTFSSTFNVP | NSP3 | 1773 | 1787 | No |
| 2494 | SHNIALIWNVKDFMS | NSP3 | 1888 | 1902 | No |
| 2495 | KGGKIVNNWLKQLIK | NSP4 | −2 | 12 | No |
| 2496 | LFVAAIFYLITPVHV | NSP4 | 18 | 32 | No |
| 2497 | AVITREVGFVVPGLP | NSP4 | 93 | 107 | No |
| 2498 | VPGLPGTILRTTNGD | NSP4 | 103 | 117 | No |
| 2499 | FLHFLPRVFSAVGNI | NSP4 | 118 | 132 | No |
| 2500 | DTRYVLMDGSIIQFP | NSP4 | 188 | 202 | No |
| 2501 | SIVAGGIVAIVVTCL | NSP4 | 283 | 297 | No |
| 2502 | FGEYSHVVAFNTLLF | NSP4 | 308 | 322 | No |
| 2503 | NTLLFLMSFTVLCLT | NSP4 | 318 | 332 | No |
| 2504 | PVYSFLPGVYSVIYL | NSP4 | 333 | 347 | No |
| 2505 | YLTFYLTNDVSFLAH | NSP4 | 348 | 362 | No |
| 2506 | SFLAHIQWMVMFTPL | NSP4 | 358 | 372 | No |
| 2507 | IQWMVMFTPLVPFWI | NSP4 | 363 | 377 | No |
| 2508 | MFTPLVPFWITIAYI | NSP4 | 368 | 382 | No |
| 2509 | TIAYIICISTKHFYW | NSP4 | 378 | 392 | No |
| 2510 | CTFLLNKEMYLKLRS | NSP4 | 418 | 432 | No |
| 2511 | LTQYNRYLALYNKYK | NSP4 | 438 | 452 | No |
| 2512 | RYLALYNKYKYFSGA | NSP4 | 443 | 457 | No |
| 2513 | YREAACCHLAKALND | NSP4 | 463 | 477 | No |
| 2514 | CCHLAKALNDFSNSG | NSP4 | 468 | 482 | No |
| 2515 | FSNSGSDVLYQPPQT | NSP4 | 478 | 492 | No |
| 2516 | SDVLYQPPQTSITSA | NSP4 | 483 | 497 | No |
| 2517 | NHNFLVQAGNVQLRV | NSP5 | 63 | 77 | No |
| 2518 | QNCVLKLKVDTANPK | NSP5 | 83 | 97 | No |
| 2519 | LLVLVQSTQWSLFFF | NSP6 | 22 | 36 | No |
| 2520 | SLFFFLYENAFLPFA | NSP6 | 32 | 46 | No |
| 2521 | LCLFLLPSLATVAYF | NSP6 | 67 | 81 | No |
| 2522 | TLVYKVYYGNALDQA | NSP6 | 147 | 161 | No |
| 2523 | DAFKLNIKLLGVGGK | NSP6 | 267 | 281 | No |
| 2524 | RVESSSKLWAQCVQL | NSP7 | 21 | 35 | No |
| 2525 | SKLWAQCVQLHNDIL | NSP7 | 26 | 40 | No |
| 2526 | VLKKLKKSLNVAKSE | NSP8 | 34 | 48 | No |
| 2527 | LIVTALRANSAVKLQ | NSP8 | 184 | 198 | No |
| 2528 | SDFVRATATIPIQAS | ORF3a | 26 | 40 | No |
| 2529 | ALLAVFQSASKIITL | ORF3a | 51 | 65 | No |
| 2530 | KIITLKKRWQLALSK | ORF3a | 61 | 75 | No |
| 2531 | CNLLLLFVTVYSHLL | ORF3a | 81 | 95 | No |
| 2532 | LVAAGLEAPFLYLYA | ORF3a | 96 | 110 | No |
| 2533 | LEAPFLYLYALVYFL | ORF3a | 101 | 115 | No |
| 2534 | LVYFLQSINFVRIIM | ORF3a | 111 | 125 | No |
| 2535 | VRIIMRLWLCWKCRS | ORF3a | 121 | 135 | No |
| 2536 | RLWLCWKCRSKNPLL | ORF3a | 126 | 140 | No |
| 2537 | KNPLLYDANYFLCWH | ORF3a | 136 | 150 | No |
| 2538 | YDANYFLCWHTNCYD | ORF3a | 141 | 155 | No |
| 2539 | FLCWHTNCYDYCIPY | ORF3a | 146 | 160 | No |
| 2540 | TNCYDYCIPYNSVTS | ORF3a | 151 | 165 | No |
| 2541 | YFTSDYYQLYSTQLS | ORF3a | 206 | 220 | No |
| 2542 | TDTGVEHVTFFIYNK | ORF3a | 221 | 235 | No |
| 2543 | EHVTFFIYNKIVDEP | ORF3a | 226 | 240 | No |
| 2544 | FIYNKIVDEPEEHVQ | ORF3a | 231 | 245 | No |
| 2545 | GSSGVVNPVMEPIYD | ORF3a | 251 | 265 | No |
| 2546 | MFHLVDFQVTIAEIL | ORF6 | 1 | 15 | No |
| 2547 | IAEILLIIMRTFKVS | ORF6 | 11 | 25 | No |
| 2548 | AEILLIIMRTFKVSI | ORF6 | 12 | 26 | No |
| 2549 | LIIMRTFKVSIWNLD | ORF6 | 16 | 30 | No |
| 2550 | TFKVSIWNLDYIINL | ORF6 | 21 | 35 | No |
| 2551 | YIINLIIKNLSKSLT | ORF6 | 31 | 45 | No |
| 2552 | MKIILFLALITLATC | ORF7a | 1 | 15 | No |
| 2553 | IILFLALITLATCEL | ORF7a | 3 | 17 | No |
| 2554 | DGVKHVYQLRARSVSPKL | ORF7a | 69 | 86 | No |
| 2555 | VKHVYQLRARSVSPK | ORF7a | 71 | 85 | No |
| 2556 | LYSPIFLIVAAIVFI | ORF7a | 96 | 110 | No |
| 2557 | SPIFLIVAAIVFITL | ORF7a | 98 | 112 | No |
| 2558 | DFYLCFLAFLLFLVL | ORF7b | 8 | 22 | No |
| 2559 | MKFLVFLGIITTVAA | ORF8 | 1 | 15 | No |
| 2560 | FLGIITTVAAFHQEC | ORF8 | 6 | 20 | No |
| 2561 | TTVAAFHQECSLQSC | ORF8 | 11 | 25 | No |
| 2562 | FHQECSLQSCTQHQP | ORF8 | 16 | 30 | No |
| 2563 | SLQSCTQHQPYVVDD | ORF8 | 21 | 35 | No |
| 2564 | ARKSAPLIELCVDEA | ORF8 | 51 | 65 | No |
| 2565 | PLIELCVDEAGSKSP | ORF8 | 56 | 70 | No |
| 2566 | CVDEAGSKSPIQYID | ORF8 | 61 | 75 | No |
| 2567 | IQYIDIGNYTVSCLP | ORF8 | 71 | 85 | No |
| 2568 | QEPKLGSLVVRCSFY | ORF8 | 91 | 105 | No |
| 2569 | EDFLEYHDVRVVLDF | ORF8 | 106 | 120 | No |
| 2570 | DFLEYHDVRVVLDFI | ORF8 | 107 | 121 | No |

Where D = dominant and ND = nondominant

[0192] The novel pools described herein augment previously described pools consisting of 1) overlapping 15-mers spanning the entire S antigen, 2) predicted HLA class II binding 15-mers from the remainder of the proteme, and 3) epitopes derived from both S and non-S predicted to bind common HLA class I.

[0193] These new pools are based on the analysis that originally capitalizes and synthetizes information fragmented in different reports in the published literature. This allows for a most comprehensive inventory of experimentally defined epitopes, and for the generation of peptide epitope pools associated with superior sensitivity and specificity to detect and analyze responses from infected and vaccinated individuals, and also identifies epitope sets useful for vaccine applications. Different variations are also disclosed to illustrate the flexibility of the approach; for example, pools can be designed based on classification of epitopes as dominant or non-dominant, further facilitating their use for characterization of immune responses to SARS-CoV-2. The peptide pools described herein can be utilized to detect and characterize immune responses to SARS-CoV-2, and facilitate the design of novel vaccines and therapeutics.

### Example 2: Definition and Recognition of SARS-CoV-2-Derived T Cell Epitopes in Humans

[0194] Over the last year, a large amount of information has been produced by the scientific community related to SARS-CoV-2 infection and the associated COVID-19 disease. Studies in the peer-reviewed and pre-print literature have addressed a variety of different virology, epidemiological and clinical aspects. In particular, a large number of studies have analyzed the immune response to the virus and the role these responses play in protection and disease, and also their importance in the context of vaccine development and evaluations. Several excellent reviews, some also in the present special issue, cover these topics (1-6).

[0195] Here, the inventors focus on the current state of knowledge related to definition and recognition of SARS-CoV-2-derived T cell epitopes in humans. While the data related to this topic was initially sparse, 25 different studies have now been published as of Mar. 15, 2021 (7-34), and collectively report data from 1197 human subjects (870 COVID-19 and 327 unexposed controls), leading to the identification of over 1400 different CD4 (n=382) and CD8 (n=1052) T cell epitopes. These studies are listed in Table 1, which also captures whether the studies defined class I/CD8 epitopes and/or class II/CD4 epitopes.

[0196] The relevant papers were selected based on the objective curation process implemented over almost 20 years ago by the Immune Epitope Database (IEDB; www.iedb.org), based on the combined use of general broad PubMed queries, combined with automated text classifiers and manual curation, as described in more detail elsewhere (35, 36). In addition, the results of the IEDB curation were manually inspected by the coauthors to guard against papers missed by the IEDB curation workflow, but no additional papers were identified.

[0197] Taken together, this disclosure focuses on the overall theme of cataloging and describing SARS-CoV-2 epitopes recognized by human T cells. The data collected is derived from the 25 studies referred above. Accordingly, the data is organized into a number of following examples, initially describing epitope definitions, screening methodologies and assay readouts. Subsequent examples describe the number of epitopes identified in the various studies, the antigens recognized and the distribution of epitopes within them, eventually leading to the definition of immunodominant regions and immunodominant epitopes. Additional sections are devoted to discussion of epitope identification in different populations and cohorts, and the related topics of HLA coverage and immunodominant HLA alleles. An overall discussion of breadth of the T cell repertoire informs discussion of pre-existing reactivity and cross-reactivity with common cold corona and other viruses, cross-reactivity with MERS, SARS-CoV-1, and potential implications for immune escape by SARS-CoV-2 variants. This disclosure is therefore relevant to the definition in molecular terms of the targets of adaptive human T cell responses to SARS-CoV-2.

### Example 3: Epitope Definitions

[0198] A detailed review of the available epitope data requires clear definition of concepts and terminology, to allow combination of different studies utilizing different methodologies. This in turn allows integration of the information in a coherent fashion. According to classical textbook definitions, “A T-cell epitope is a short peptide derived from a protein antigen. It binds to an MHC molecule and is recognized by a particular T cell” (43). And, similarly, “The parts of complex antigens that are specifically recognized by lymphocytes are called determinants or epitopes” (44).

[0199] T cell epitopes are usually peptides composed of the 20 naturally occurring amino acids, although recognition of haptens, sugars and post-translationally modified peptides has also been described (45, 46). The topic of post-translationally modified epitopes has been reviewed elsewhere (45). While many post-translationally modified epitopes have been described in the cancer setting and autoimmunity, few have been described in the case of viral antigens. However, one topic of particular interest, also in the context of SARS-CoV-2, will be to evaluate if glycosylated sites are differentially recognized, also in the context of N>D modifications associated with removal of the polysaccharide moiety in the course of cellular processing. But thus far, in the case of SARS-CoV-2, no reports have appeared of post-translationally modified or glycosylated peptides being recognized by T cell responses.

[0200] T cells recognize a bimolecular complex of an epitope bound to a specific class I or class II MHC molecule (HLA in humans), which is called its restriction element. HLA class I restricted epitopes are generally 9-10 residues in size, with several also being 8 or 11 residues, depending on HLA-restriction, while class II restricted epitopes are typically 13-17 residues, although shorter and longer peptides have also been described. By the late 1980s it was appreciated that a given peptide can bind multiple HLA allelic variants, especially if those variants are structurally or genetically related (47, 48). The HLA variants or types associated with overlapping peptide binding repertoires are classified into so called HLA supertypes (49, 50). Epitopes that bind multiple HLAs are referred to as promiscuous (51, 52). In general, any given HLA/peptide complex can be recognized by a multitude of different T cell receptors, which often share a discernible pattern of sequence similarity (53, 54).

[0201] Viral genomes and proteomes are composed of multiple protein antigens. Each of these antigens is recognized in a human population to varying degrees (55, 56). The concept of immunodominance usually refers to how strongly a given antigen is recognized, while immunoprevalence refers to how often the antigen is recognized (57-59), although in practice the two terms are frequently used somewhat interchangeably.

[0202] Immunodominance of a given antigen within a genome or proteome is influenced by variables such as levels of transcription and expression, stability, and patterns of expression in different cell types or anatomical sites. In the context of SARS-CoV-2, Poran et al. point out the potential of leveraging proteomic data to infer relative viral protein abundance (23, 24). Several other studies have eluted SARS-CoV-2-derived peptides bound to HLA (39-41), but have not shown that the epitopes are actually recognized by T cell responses. Future studies will examine the correspondence between eluted ligands and T cell recognition.

[0203] The fact that HLA binding is a necessary but not sufficient requisite for T cell recognition has been well established (56, 60-62), as it does not guarantee that the peptide will be generated by antigen processing, and does not ensure and the availability of a repertoire of T cells capable of recognizing the corresponding epitope/HLA complex (63, 64). In the case of eluted ligands (65, 66), factors to be considered are whether the assay used to detect eluted ligands has sensitivity comparable to T cell activation (a few epitope copies have been shown to be sufficient to activate T cells (67, 68), and again the availability of TCR repertoire, which is also modulated by previous infection history, as discussed in more detail below.

[0204] Immunodominance and immunoprevalence within a given antigen indicates, of all possible peptide epitopes contained in the antigen, how frequently and vigorously a particular epitope is recognized (55, 56). Immunodominance/prevalence hierarchies within an antigen are influenced by variables such as HLA binding capacity, antigen processing, and the repertoire of TCR recognizing a given HLA/epitope combination. Finally, the term breadth of responses is defined on the basis of how many antigens or epitopes are recognized, either at the level of a given individual or in a population as a whole (55, 56).

### Example 4: Screening Methodologies

[0205] The process of epitope identification requires testing collections of candidate peptides in an assay of choice. The peptide collections utilized can span the entire genome or proteome, or focus on selected antigens of interest. Furthermore, the peptide collections may correspond to either sets of overlapping peptides (a popular choice is 15-mers overlapping by 10 residues) spanning a sequence, or peptides predicted to bind to one or more different HLA types, as indicated in Table 1. In general, and in the case of SARS-CoV-2 in particular, overlapping peptides are more often used in the case of defining class II restricted epitopes (4 of 9 studies; 44%), at least in part due to the lower predictive efficacy of HLA class II predictions (69), than in the case of class I epitopes (6/25 studies; 24%), where predicted binders are more often used to probe responses (21 of 25 studies; 85%). While the length of HLA class II restricted epitopes varies, the use of 15-mers overlapping by 10 residues ensures that any possible 10-mer is represented in the peptide set, with the addition of flanking residues at either or both ends. Given the fact that the critical core of class II epitopes is 9 residues in size, this ensures that most if not all epitopes are identified, without having to rely on bioinformatic predictions.

[0206] Another issue of relevance is whether responses are measured directly ex vivo or if an in vitro culture restimulation step is introduced. A restimulation step is often used to expand low frequency T cell specificity which would otherwise be difficult to detect. A number of different methodologies are used to detect or expand T cells, ranging from stimulation with whole antigens or antigen fragments, to the use of peptide pools or isolated individual peptides. However, in vitro restimulation is known to substantially alter the phenotypes and/or relative frequency of responding T cells. Expansion of naïve T cells can also occur. In the case of SARS-CoV-2, studies have shown that when PBMCs are expanded for 10-14 days before the assessment of SARS-CoV-2 responses, CD4⁺ T cells expand to a much greater extent than CD8⁺ T cells (10, 19).

[0207] To overcome these caveats, it is preferable to assay T cells ex vivo whenever possible. In the case of SARS-CoV-2 T cell epitopes, 14 studies have used direct ex vivo assays (Table 1), and 12 utilized in vitro culture (one study utilized both in vitro and ex vivo approaches). Alternatively, once the epitopes are identified, they can be used to conduct secondary epitope validation experiments with direct ex vivo modalities, as shown by 2 studies (7, 30). Of note, Keller et al. showed that expansion of SARS-CoV-2 T cells can be accomplished in controlled conditions, and raised the possibility that epitope expanded T cells may be used for adoptive therapy (13). The principle and conditions for adoptive therapy have been described and reviewed elsewhere (70).

[0208] Thus, in general, each assay methodology has its own advantages and disadvantages. Whole blood and ELISPOT assays are simplest, and require less sophisticated equipment, but yield less granular information. In vitro culture assays allow expansion of relatively rare T cell specificities, while ex vivo assays allow to detect responses without manipulations that can be associated with phenotypic and functional alterations.

### Example 5: Assay Readouts

[0209] Regardless of whether T cell responses are detected ex vivo or after in vitro expansion, a variety of different assay methodologies are available to investigate specific T cell responses. In selecting an approach, several considerations apply, including ease of implementation, throughput, and comprehensiveness and functionality. Certain assays, such as enzyme-linked immunospot (ELISpot), supernatant determination, and whole blood assays are relatively easier to employ and more amenable to high throughput testing. However, they are associated with less granular information. For example, the CD4 vs CD8 phenotype (and the expression of other cell markers) of the responding cells is not readily established by these methods, compared to others such as Intracellular Cytokine Staining (ICS) or Activation Induced Marker (AIM) assays. The methodologies utilized by the various studies include AIM, degranulation, proliferation, ELISA, ELISpot, ICS, cytotoxicity, and multimer-based assays (for 3, 2, 2, 1, 5, 10, 1 and 13 studies, respectively).

[0210] Over a dozen studies (8-10, 12, 21, 23-32) performed high-resolution analysis of SARS-CoV-2-specific CD8⁺ T cells using HLA multimers. However, none of the studies reported similar multimer analyses for CD4⁺ T cells, despite the fact that, in general, HLA class II restricted SARS-CoV-2-specific T cell responses are more pronounced compared HLA class I restricted T cell responses (20, 71). This reflects the relatively higher availability of HLA class I multimeric reagents, as compared to their HLA class II counterparts. Some studies analyzed epitope specific responses not only in blood but also in tissues, such as tonsil and lung tissue from uninfected donors (10). Analyzing tissue-derived T cells can contribute particular insight into disease, such as for example defining characteristics of Tissue Resident Memory T cells, which may differ from those circulating in the peripheral blood (72).

[0211] An issue encountered with ELISpot and ICS and related assays is that while they, by definition, identify T cells capable of a functional response, they only (also by definition) detect T cells producing a cytokine of choice; therefore, they are “blind” to T cells producing different cytokines or that do not produce cytokines in large amounts within the window of time of the assay (e.g., T follicular helper [Tfh]CD4 T cells generally produce very low amounts of cytokines). Both AIM (73-75) and HLA tetramer/multimer assays are “agnostic” in this respect, as they detect all cells activated by the epitope (AIM), or all cells expressing a TCR capable of binding a given epitope/HiLA complex (tetramer/multimer). Accordingly, it is frequently observed that AIM and tetramer assays have higher sensitivity because they detect larger numbers of T cells, as compared to ELISpot assays. Sahin et al. note that comparison of data from MHC multimers with bulk IFNγ⁺ CD8⁺ T cell responses indicated that a functional T cell assay may underestimate the total cellular immune response (27). Conversely, T cells captured by tetramers might not be functional or exhausted, and therefore might overestimate the cellular response relevant for immunity and control of infection. However, for SARS-CoV-2, it has indeed been observed that CD8 T cells identified by HLA-multimers in COVID-19 subjects are functional and not exhausted (26). In conclusion, a variety of epitope screening and assay strategies have been utilized, each with its own features and potential advantages/disadvantages.

### Example 6: Epitopes Identified

[0212] Table 1 lists the total number of characterized canonical CD4 and CD8 epitopes identified in each study, which ranged from 1 to 734 (median of 12). It should be noted that it is not possible to estimate the total number of unique identified epitopes by simply adding these numbers, because the same epitope might be identified independently in multiple studies (as addressed below in the immunodominance section), and/or, especially in the case of CD4 epitope studies utilizing overlapping peptides, essentially the same epitope might be identified by two largely overlapping peptides.

[0213] To address this point, to assess CD4 epitope redundancy the data were further analyzed taking advantage of the clustering tool provided by the IEDB (76), which automatically removes duplications and largely overlapping entries, as well as additional manual curation. The clustering tool is an algorithm that generates clusters from a set of input epitopes based on representative or consensus sequences. This tool allows the user to cluster peptide sequences on the basis of a specified level of identity by selecting among three different method options. For these purposes, the inventors utilized the default “cluster-break” settings which generates clusters where all component epitopes share at minimum a specified level of homology (70%), and no epitope is present in more than one cluster. Because of the closed ends of the class I MHC binding groove, and hence the incapacity of class I binding peptides to assume alternate frames, overlapping CD8 epitopes are considered unique epitopes by default.

[0214] Accordingly, the studies listed in Table 1 encompass 1434 unique epitopes, including 1052 different class I and 382 different class II non-redundant epitopes (versus 416 leaving in redundancies).

### Example 7: Antigenic Targets and Epitope Distribution

[0215] Ten of the 25 epitope identification studies (8, 9, 12, 19, 20, 25, 28-30, 33, 34) screened peptides derived from the entire SARS-CoV-2 proteome (seventh column of Table 1). The main antigenic targets of CD4 and CD8 SARS-CoV-2 T cell responses have been defined by several studies utilizing overlapping peptides, mostly not resolving the actual epitopes (34, 71) and also reviewed elsewhere (1, 78). These studies determined that structural proteins (S, M and N) are dominant targets of T cell responses, with ORF3, ORF8, and nsp3, 4, 6, 7, 12 and 13 (ORF1ab) also being frequently targeted. Other studies focused on specific subsets of SARS-CoV-2 antigens, as also detailed in the seventh column of Table 1.

[0216] The various studies differ widely in the depth of screening, number of antigens tested, HLA alleles targeted, and number of peptides screened. For example, Peng et al. (22) screened the whole proteome, with the exception of ORF1ab, using 423 peptides assayed in 42 infected and 16 non-exposed subjects and reported broad CD4 and CD8 responses. Conversely, Schulien et al. (30) only tested 5 peptides predicted to bind each of ten different HLAs. Tarke et al. (34), using PBMC from 99 donors, probed for CD4 responses using 1,925 peptides spanning the entire SARS-CoV-2 proteome, and for CD8 responses tested an additional 5,600 peptides predicted to bind one or more of 28 prominent HLA class I alleles. Snyder et al. (33) screened 545 peptides distributed over the SARS-CoV-2 proteome for 26 class I alleles, testing about 20 peptides/allele. Nelde et al. (20) screened a large number of donors (220 in total) with peptides spanning the breadth of antigens (i.e., whole proteome) predicted to bind six HLA class I alleles or various HLA-DR class II. Le Bert (16) focused on peptides derived from N, nsp7 and nsp13, while Ferretti (8) screened predicted peptides from the entire proteome for 6 HLA alleles in 5 to 9 donors per each HLA.

[0217] The epitope distribution along the SARS-CoV-2 proteome is analyzed in more detail in FIGS. 1A-1B, where the number of epitopes identified in each antigen is shown for CD4 and CD8 epitopes, respectively. FIGS. 1C-1D shows the correlation between the number of epitopes and the total number of residues (size) of each antigen. A significant correlation exists between antigen size and the number of epitopes identified for both CD4 (p=0.0015 and r\hat{ }=0.36) and CD8 epitopes (p<0.0001 and r\hat{ }2=0.76). Certain antigens (N, M, S and E) were studied in more detail (more studies) (FIGS. 1E-1F), so that this is a significant factor, in addition to antigen length, in influencing the number of epitopes identified. Additionally, it was recognized early that the immunodominance pattern of the CD4 and CD8 T cell response to SARS-CoV-2 largely tracks with the expression level of each of the 25 viral proteins (71). S, M, and N sgRNAs are highly expressed by SARS-CoV-2 infected cells, and those three proteins are the most immunodominant targets of human CD4 and CD8 T cell responses to SARS-CoV-2 (71).

[0218] In conclusion, T cell responses are multi-antigenic, with the structural antigens being broadly recognized, but other proteins, such as nsp3, nsp4, nsp12 and ORF3a, are also vigorously recognized. This difference is not unexpected, given the fact that structural proteins are present in high concentrations in the virus, and accessible to the exogenous processing pathway and HLA class II molecules. Conversely, non-structural proteins are produced in infected cells and have, together with the structural proteins, access to the endogenous processing pathway and HLA class I molecules.

### Example 8: Immunome Browser Analysis Identifies General Patterns of Immunodominance

[0219] In the next series of analyses, the inventors addressed whether discrete immunodominant regions would be apparent when the data derived from the different studies was globally considered. To perform this meta-analysis, the inventors utilized the Immunome Browser tool (79, 80), developed and hosted by the IEDB (www.iedb.org). This tool allows visualization of patterns of immunodominance across the entire SARS-CoV-2 proteome by plotting for each residue the 95% confidence interval (CI) of the Response Frequency (RF), defined as the number of individuals and assays reporting positive responses to a peptide encompassing the particular residue. The lower bound RF values, using an average across a sliding 10 residue window, are plotted for human CD4 and CD8 epitopes in FIGS. 2A to 2F for S, M, N, nsp3 and nsp12, as these antigens are the ones from which epitopes were described in sufficient numbers to allow delineation of discrete immunodominant regions.

[0220] In the case of spike protein, several immunodominant regions were observed for CD4 (residues 154-254, 296-370 and 682-925; FIG. 2A), compared to a more homogenous distribution for CD8 (FIG. 2B). For the other structural proteins, namely membrane and nucleocapsid, similar immunodominant regions for CD4 (FIG. 2C) and CD8 (FIG. 2D) were noted, with the 7-101 and 131-213 residue range being more prominent for the membrane protein, and the 31-173 and 201-371 range for nucleocapsid. More marked differences in CD4 and CD8 immunodominant regions, as well as overall response frequency, are observed in the cases of nsp3 (FIG. 2E) and nsp12 (FIG. 2F). Here, for both proteins, defined immunodominant regions for CD4 (789-843, 1118-1158 and 1873-1903 for nsp3 and 863-903 for nsp12) were evident, versus more homogenous patterns of CD8 recognition, similar to what was noted for spike (FIG. 2B). In conclusion, CD4⁺ T cells in general recognize more defined immunodominant regions than the corresponding CD8⁺ counterpart.

### Example 9: Epitope Identification in Different Populations and Cohorts

[0221] As a whole, the different studies considered here have reported epitope identification results from a total of 1197 donors (median=34, range 2 to 220; see the eighth and ninth columns of Table 1). Of those, 870 donors were SARS-CoV-2 infected, and 327 unexposed. It should be noted that these reflect the maximum number of donors utilized in each epitope identification and characterization study, as some assays and some epitopes have been tested in a different number of donors. For example, in some cases 20 donors were tested in ELISpot, but only 10 were evaluated using MHC multimers. Similarly, in several instances, because of the need to match peptide candidates to specific predicted HLA alleles (e.g., HLA-A*02:01 candidate epitopes may only have been tested in HLA-A*02:01 positive donors), the actual number of donors in which each peptide was tested may be significantly lower in comparison to other peptides.

[0222] Several studies have analyzed differences between the infected and unexposed cohorts, and also in the context of potential cross-reactivity of SARS-CoV-2 epitopes with homologous sequences from common cold coronaviruses or other viruses, as discussed in more detail below. Also, as noted elsewhere (5), considerable heterogeneity exists in SARS-CoV-2 infection and immune responses, as a function of different variables such as age, gender, disease severity, ethnicity and time since symptom onset. To date, the epitope identification studies as a whole do not yet answer the question whether differences in the types of epitopes recognized exist as a function of these variables. However, the epitopes defined in these studies will undoubtedly be key, alongside data generated with peptide pools, to probe variables such as age, gender, disease severity, ethnicity and time since onset of symptoms.

[0223] One aspect to consider, and touched on further below, is to ensure that different ethnicities are adequately represented. Thus far, most studies have been performed in donor cohorts that are, or are expected to be, mostly composed of Caucasians, and relatively under-representative of other races and ethnic groups.

### Example 10: HLA Coverage and Epitope Identification Results

[0224] It is well appreciated that HLA molecules are associated with an outstanding degree of diversity. Class I molecules are encoded by 3 main loci (A, B and C), and class II molecules are encoded by four main loci (DRB1, DRB3/4/5, DP and DQ). Each locus is highly polymorphic, and because of heterozygosity each individual may express close to 14 different HLA molecules, and minimum of 7 (if homozygous at all loci). Not only are the various HLA loci highly polymorphic, but the frequencies of respective alleles vary, sometimes dramatically, across different ethnicities (81, 82). Establishing the extent that epitope identification efforts provide adequate coverage of the worldwide population is both a key and non-trivial issue (49, 83, 84).

[0225] To meaningfully discuss population coverage considering HLA allelic variants in the context of epitope identification efforts, it is necessary to define what is meant by population coverage. The total phenotypic coverage provided by a set of HLA alleles represents the fraction of individuals that express at least one of a given set of alleles, while genotypic coverage corresponds to the fraction of genes at a specific locus the set of allelic variants covers. By way of example, an analysis targeting the HLA-A*01:01, B*07:02 and DRB1*01:01 molecules will give a phenotypic coverage (probability that an individual in the average worldwide population will express at least one of these alleles) of approximately 35%. However, these three allelic variants represent only about 5-10% of the gene variants each at the three different respective loci. This is important because in an individual that is “covered,” in the sense of expressing one HLA, the bulk of the T cell response will likely be directed to the other, up to thirteen, class I and class II alleles, leading to gross misrepresentation of the total response magnitude and target specificity.

[0226] In previous studies, the inventors devoted significant efforts to analyze the number of different HLA alleles associated with good genotypic and phenotypic coverage, and found that about 25 different HLA class II and about 25 different HLA class I alleles are required to cover 90% or more individuals in an idealized population (43, 61, 62). In the case of SARS-CoV-2 epitope identification studies, HLA restricted epitopes have been identified for 30 HLA class I and 45 HLA class II alleles (FIGS. 3A-3D), including, in both cases, the vast majority of the most common specificities in the general worldwide population (49, 81, 85). FIGS. 3A to 3D show a non-limiting example of the Defined HLA class I and class II restrictions. HLA restricted epitopes have been identified for 30 class I (FIG. 3A) and 45 class II (FIG. 3B) molecules. The number of epitopes associated with each allele is plotted. FIG. 3C shows CD8 responses and FIG. 3D shows CD4 responses induced by Spike CD8 and CD4 megapools, respectively.

[0227] The median number of epitopes per allele is 35 (range 1 to 219) for class I, and 12 for class II (range 1 to 82). In the case of class I, as might be expected, the most restrictions have been identified in the contexts of A*02:01, A*24:02, A*01:01 and B*07:02, as these are the most common class I alleles worldwide. Similarly, the most class II restrictions are for DRB1*07:01 and DRB1*15:01, the most common DRB1 specificities worldwide. In both cases, the number of restrictions generally corresponds to overall allele frequency in the respective cohorts. This data exemplifies how the number of epitopes associated with a particular allelic specificity may not necessarily reflect immunodominance, but rather bias due to the availability of corresponding donor samples. Thus, the limited number of epitopes identified for several alleles is because they are rarer, and therefore reflective of investigational bias. Additional studies are required to enable fully unbiased investigation of SARS-CoV-2 on a global scale. The number of allelic restrictions identified by the different studies is summarized in the tenth and eleventh columns of Table 1.

[0228] Overall, the 25 different studies mapped or inferred 1191 class I restrictions, including 1019 unique epitope/allele combinations (Table 1), with individual studies defining between 1 and 523 (median 8). For class II, 783 restrictions were mapped or inferred, with 760 representing unique epitope/allele combinations (Table 1). Only 9 studies investigated CD4 responses, with just 3 identifying class II restrictions (see Table 1). Thus, experimentally defined HLA restrictions are fewer in the case of class II as compared to class I, consistent with the fact that class I restrictions are more easily inferred or determined, and that multimers/tetramers (which implicitly assign restriction) are more broadly available for HLA class I as compared to HLA class II.

### Example 11: Immunodominance at the Level of Specific Epitopes and Alleles

[0229] Different studies report numerous peptides as being immunodominant, although each study also used different subjective definitions of immunodominance. While some peptides are repeatedly and independently identified, differences in the screening procedures utilized, HLA alleles considered, antigens targeted, sampling of small numbers of individuals, and how “immunodominance” is defined by the various authors, all contribute to differences in outcomes. For example, Peng et al. (22) reports several immunodominant peptides which they defined as being recognized by 6 or more of the up to 16 subjects screened. Tarke et al. (34) also highlight some epitopes as more dominant, with 49 class II epitopes being recognized in 3 or more donors from an average of 10 donors tested, and 41 class I epitopes recognized in 50% or more of the HLA matched donors tested. The same study also finds that the response is broad and multi-specific, with approximately 8-9 different antigens required to cover about 80% of the total CD4 and CD8 response (34). Nielsen et al. also concludes that the response is broad, since the top three immunogenic epitopes are derived from separate SARS CoV-2 proteins (21). Keller et al. reports immunodominant epitopes defined as epitopes being recognized in multiple donors from M, N and S (13).

[0230] Some specific epitopes are highlighted as immunodominant in multiple studies. For example, in the context of the HLA-A*02:01 class I molecule, which is the most studied for CD8 SARS-CoV-2 responses, the S 269-277 epitope (sequence YLQPRTFLL (SEQ ID NO:1266)) is detected in 81% of HLA-A2+ individuals in the Nielsen study (21). The same A2 dominant epitope is also reported by Shomuradova et al., who tested 13 A2 peptides in total, and also identified a less strongly recognized epitope (32). In the Habel et al. study, of the 14 peptides screened, S 269-277 generated the strongest IFN-f response, with S 976-984 and ORF1ab 3183-3191 less prominently recognized (10). Ferretti et al. identified 3 epitopes recognized in 3 or more subjects (67% of the subjects tested), including S 269-277 (8). The study by Sahin et al. reports S 269-277 as most dominant epitope, and also identifies epitopes strongly recognized in the context of HLA-A*24:02 and HLA-B*35:01 (27). Rha et al. detected S 269-277 responses in 37 of 112 (33%) patients, while S 1220-1228 was detected in only 2 of 40 (5%) patients (26), though other studies have observed higher response rates for this latter epitope. Overall, the S 269-277 epitope was found to be positive in 11 independent studies. In one embodiment, the present invention excludes SEQ ID NO:1266.

[0231] Another example of an immunodominant epitope is provided by the HLA-A*01:01 restricted nsp3 819-828 epitope (sequence TTDPSFLGRY (SEQ ID NO:661)). This epitope was reported by Nelde et al. as positive in 83% of the donors tested (20). This study also identified a large number of additional dominant CD4 and CD8 restricted epitopes. The same A1 restricted epitope was also reported by Saini et al., who tested over 3,000 peptides for 10 alleles (28, 29), and found 214 peptides that were recognized in 16 out of the 18 samples analyzed. Two additional HLA-A*01:01 epitopes that overlap with TTDPSFLGRY (nsp3 818-828 (SEQ ID NO:661), sequence HTTDPSFLGRY (SEQ ID NO:660), and nsp3 819-829, sequence TTDPSFLGRYM (SEQ ID NO:662) were also identified as particularly dominant. The study by Gangaev et al. screened 50 epitopes for 10 alleles using tetramers (500 total) in 18 donors and identified nine epitopes in total, including the immunodominant nsp3 epitope restricted by HLA-A*01:01 (9). In one embodiment, the present invention excludes SEQ ID NO:660, 661, and 662.

### Example 12: Global Analysis of Immunodominant Epitopes

[0232] The overall data was further inspected to determine whether particular HLA alleles and epitopes are dominantly recognized. In the case of HLA class II, because of the technical issues discussed above, dominant alleles are less readily assigned as restriction elements. In the case of HLA class I, certain alleles, such as HLA-A*01:01, B*07:02, B*08:01 and B*44:01 were associated with dominant responses (34). Other alleles, such as HLA A*02:01, were associated with numerous epitopes, but with responses of lower magnitude on average, and alleles such as A*30:01 and A*32:01 were associated with weak and infrequent responses. This HLA-allele-specific variation in response frequency/magnitude has been observed previously in the contexts of HIV and Dengue virus, where responses mediated by particular HLA allelic variants were associated with protection or susceptibility to disease (85, 86). Whether HLA types play a role in influencing disease severity in the context of SARS-CoV-2 will have to be established as larger data sets become available.

[0233] For the present purposes, the inventors have defined the most dominant CD4 and CD8 epitopes as those recognized in 3 or more donors/studies, consistent with the definitions utilized by Mateus et al. and Tarke et al. (19, 34). The inventors utilized this threshold based on previous experience in this matter. Selecting epitopes that have been recognized in multiple different experiments in separate donors allow to narrow the number of epitopes and focus on more dominant/prevalent responses, while still preserving the goal of representing epitopes presented by a wide variety of HLA alleles. That is because less common HLA are found, by definition, in a fewer individuals, and the studies considered involved a median of 34 donors. Therefore, raising the “bar” further would restrict “immunodominant epitopes” to just those restricted by alleles that are very common in the Caucasians.

[0234] The immunodominant epitopes identified accordingly are highlighted in Supplemental Table 1. In total, 399 epitopes (110 CD4 epitopes, and 289 CD8 epitopes), have been highlighted. It is important to note, and consistent with what was observed in other systems, that in no case was a given epitope that was tested in more than two donors recognized in 100% of the cases. This is of relevance, as it argues against using single epitope tetramers to measure responses, because of the likelihood of false negative results. Conversely, the results argue for the use of peptide pools or multiplexing strategies (12, 20, 31, 32) to ensure broad coverage of responses.

[0235] Another important consideration, as noted above, is the influence of investigational bias. It is apparent that epitopes from the spike protein, and those restricted by the most common HLA alleles, are overrepresented, likely a reflection that the spike antigen and those particular HLA alleles are more frequently studied (FIGS. 2E-2F).

### Example 13: Breadth of the T Cell Repertoire

[0236] As summarized above in FIGS. 1A-1F, a total of 1434 unique, non-redundant, CD4 and CD8 epitopes have been defined, with the top 10 antigens accounting for 86% of the total. In these 10 most dominant antigens, a median of 87 epitopes (range of 33 to 396) is recognized. The data presented above demonstrates that T cell responses are multi-antigenic, with structural antigens being broadly recognized, but other proteins such as nsp3, nsp12, ORF3a and ORF8 also being vigorously recognized. Furthermore, data from Tarke et al. show that each individual is conservatively estimated to recognize on average 19 different CD4 and 17 different CD8 epitopes (34). Although individuals target multiple epitopes, the efficacy of the responses and number of epitopes targeted may vary substantially, dependent on HLA, the severity of disease and other factors.

[0237] This breadth of response is apparently at variance with other reports describing only a limited number of epitopes (7, 12, 16, 17, 21, 26, 27, 31). In some cases, in vitro expansion with artificial antigens was utilized, and/or a limited number of subjects, cells, and/or epitope candidates were screened. Furthermore, several of the reported narrow repertoire epitopes are different in the different studies, consistent with a stochastic selection effect. Overall, the data curated in the IEDB as of Mar. 15, 2021, reveals that over 1400 different SARS-CoV-2-derived peptide sequences have been reported as recognized by human T cell responses, to include 382 CD4 and 1052 CD8 epitopes.

### Example 14: Pre-Existing Reactivity and Cross-Reactivity with Common Cold Corona and Other Viruses, Cross-Reactivity with MERS and SARS-CoV-1

[0238] Several studies have detected responses to SARS-CoV-2 sequences in unexposed controls (4, 5). In some cases, it is possible that these responses might correspond to infections associated with lack of antibodies or a transient antibody response (20, 31). However, in other cases these responses appear to be linked to pre-existing memory responses, which at least in some instances, have been shown to map to cross-reactive recognition of the SARS-CoV-2 sequences by T cells induced by endemic “common cold” coronaviruses (17) or potentially other viral species (16, 87). This phenomenon has received considerable attention because of its potential to influence disease severity, vaccination outcomes, and potential implications for herd immunity (4, 5, 87-89).

[0239] Epitopes recognized in non-exposed individuals have been defined in 12 studies. It has been shown that, at least in some cases, the SARS-CoV-2 epitopes have significant homology to common cold coronavirus sequences, and cross-reactivity was demonstrated at the molecular level in several instances (19). Other studies, as discussed in more detail below, have examined whether SARS-CoV-2 specific T cells might cross-react on other more closely related viruses, such as SARS-CoV-1 and Middle East Respiratory Syndrome virus (MERS) (see also below). This issue is of relevance in the context of the potential for development of vaccines eliciting T cell responses broadly recognizing coronaviruses of pandemic potential.

[0240] The topic of pre-existing immune responses and cross-reactivity with common cold coronaviruses was addressed by several studies, with a range of findings. Schulien et al. detected cross-reactive T cells in longitudinal samples pre-and-post infection, and reported that these cells were expanded post in vitro restimulation (30). Sekine et al. also detected widespread reactivity in non-exposed individuals using peptide pools (31). Shomuradova et al. detected pre-existing T cell reactivity in unexposed donors using HLA-A2 tetramers, but at much lower levels compared to what was seen in exposed individuals (32). Nelde et al. tested reactivity of non-exposed donors to epitopes identified in exposed individuals, and detected reactivity, albeit at lower levels, for several epitopes (20). Keller et al. detected T cells with minimal cross reactivity with two homologous nucleocapsid peptides from NL63 and OC43 (13). Ferretti detected reactivity to OC43 and HKU1 sequences for 2 of 29 dominant epitopes, and no reactivity for NL63 and 229E (8). Rha et al. reported that the SARS-CoV-2 S 269-277 and S 1220-1228 epitopes had low homology to OC43, HKU1, 229E, and NL63, and that MHC class I multimer+ cells were not detected in unexposed subjects (26). Prakash identified 24 epitopes, and of those, 11 recalled memory CD8+ T cells from unexposed healthy individuals (25).

[0241] By way of explanation, but not a limitation of the present invention, a potential explanation for the differences observed in the degree of cross-reactivity of epitope repertoires detected in infected and unexposed subjects is provided by the studies of Mateus et al. and Tarke et al. These studies demonstrated that, overall, 50% of the epitopes defined in unexposed donors were also recognized in SARS-CoV-2 infected subjects (19, 34), but also that the viral infection created a new repertoire of epitopes recognized only in infected subjects. Conversely, more than 80% of the epitopes defined in SARS-CoV-2 infected subjects were not recognized in unexposed donors. This suggests that a pre-existing repertoire of cross-reactive T cells is present in unexposed donors, but that the SARS-CoV-2 infection generates a largely novel repertoire of T cells in addition to the pre-existing one. Consistent with this view, the antigens dominantly recognized in exposed donors tend to only partially overlap with those dominant in non-exposed donors (16).

[0242] The issue of how preexisting memory reactivity might influence immunity has been debated, and a firm conclusion has not been reached as of yet (4, 88, 90). While it is not expected that preexisting T cell reactivity might protect against infection, it is possible that preexisting SARS-CoV-2 cross-reactive T cells might modulate disease severity, as reported by a recent study (91), or even modulate vaccine responsiveness, allowing for a faster or more vigorous response.

[0243] The study of protective versus detrimental T cell responses is important to determine the optimal T cell engagement strategies for vaccines. In addition to understanding the relationship between pre-existing immunity to human coronaviruses and host defense against SARS-CoV-2, it is relevant to also consider the contribution of COVID-19 vaccine-boosted cross-reactive immune responses to vaccine-induced protective immunity.

[0244] As mentioned above, several studies have addressed whether SARS-CoV-2 T cells might cross-react with more closely related viruses such as SARS-CoV-1 and MERS. This issue is relevant in the context of development of vaccines eliciting T cell responses broadly recognizing coronaviruses of pandemic potential.

[0245] As might be expected on the basis of the higher degree of sequence homology, cross-reactivity between SARS-CoV-2 responses and SARS-CoV-1 and MERS was more frequently detected, as compared to common cold coronaviruses. More specifically, Le Bert et al. analyzed a cohort of 23 patients who recovered from SARS-1, and found long lasting memory T cells 17 years after the SARS-1 outbreak of 2003 (16). Habel et al. reported that T cells recognizing selected A2/SARS-CoV-2 CD8+ T cell epitopes can cross-react with SARS-CoV-1 and MERS, while they did not share homology with the common cold coronaviruses (10). Rha et al. reported that the S 269-277 epitope was specific to SARS-CoV-2, whereas the S 1220-1228 epitope was conserved in SARS-CoV-1 (26). In the study of Gangaev, of the 9 CD8 T cell epitopes they identified, 5 were unique for SARS-CoV-2 and 4 were shared between SARS-CoV-2 and SARS-CoV-1 (9). Prakash et al. also studied conserved pan-species epitope sequences considering all coronaviruses, including those responsible for zoonotic infections (25).

### Example 15: Potential for Immune Escape by SARS-CoV-2 Variants

[0246] Another topic of relevance is the effect of naturally occurring mutations on epitope recognition. SARS-CoV-2 does mutate, and one question is whether it will mutate to escape T cell responses. The large breadth of T cell epitopes recognized, and the fact that, dependent on HLA polymorphism, each individual tends to recognize its own unique sets of epitopes, has profound implications in the context of immune escape. A recent study showed that mutations selected for predicted negative impact on epitope binding to HLA were indeed associated with reduced T cell activity (92). Other analyses of mutations associated with several variants of concern suggest that the vast majority of defined epitopes are conserved in SARS-CoV-2 variants (93, 94).

[0247] The topic of potential immune escape by variants has been elevated by the observation that several recent SARS-CoV-2 variants of concern have accumulated unusually large numbers of mutations and exhibit significant evidence of escape from neutralizing antibodies (95-97). This evolution appears to be due to extended replication in immunocompromised individuals, at least in some cases (98). Given that immunity against COVID-19 consists of both antibody and T cell responses, there has been concern as to whether the variants escape T cell immunity.

[0248] The study of sequence variation and epitope recognition is of particular importance in the context of several well described Variants of Concern (VOCs). Two independent studies (93, 94) show that most of the epitopes defined by Tarke et al. (34) or Kared et al. (12) are conserved within VOCs. Consistent with these observations, it has been shown that the sequence variations associated with the B.1.1.7, B.1.351, P.1, and CAL.20C variants had impact on T cell responses induced by natural infection or vaccination with the ancestral Wuhan sequence limited to decreases in overall activity of less than 30% at the population level (93, 94). Because of the large number of different epitopes reported, as noted above, and of the large breadth of epitopes recognized in any given individual (again, estimated to be an average of 19 class II and 17 class I epitopes per person, genome-wide, and 9 if spike only is considered), as suggested by one study (34), it appears unlikely that the new variants will have the capacity to escape T cell recognition, at both the population and individual levels.

[0249] In light of the data indicating that T cell escape is not occurring (93), it is also worthwhile to discuss the immunological and virological features that make T cell escape by SARS-CoV-2 unlikely. First, as noted, the broader the T cell response, in terms of epitopes, the less likely viral escape becomes because any individual epitope escape mutation by the virus would represent a small fraction of the overall immunity, and thus represent a small selective pressure. Given that SARS-CoV-2 is a large RNA virus (i.e., encoding a large amount of sequence space), the breadth of the CD4 and CD8 T cell responses is not surprising per se.

[0250] Second, there are few examples in the literature of T cell epitope escape in humans for a virus that causes acute infections. In contrast, viruses that cause chronic viral infections, such as HIV and HCV, are well known to escape T cell epitope recognition. This is due to a fundamental difference in selective pressure. Within a single person, there is strong selective pressure for a chronic viral infection to escape T cell responses over time. In contrast, in a population of people, the diversity of HLA alleles presents a fundamental challenge for viral escape. That phenomenon is a basic premise in the understanding of the evolutionary value of human HLA diversity. Escape of one or more T cell epitopes in one individual is unlikely to give the virus a selection advantage in the next host; indeed, the escape mutations are more likely to be a disadvantage because the original viral protein sequence was selected for functionality. However, as observed in the influenza system (99) where restoration of viral fitness was obtained by multiple compensatory co-mutations in the nucleoprotein, generation of SARS-CoV-2 cytotoxic T-lymphocyte escape mutants by a similar mechanism is possible. Potential selection of viral T cell escape variants will be dependent on how well the spread of SARS-CoV-2 is controlled for, and even though the selection for T cell escape variants may be highly restricted due to factors discussed above, it cannot be ruled out at this time.

[0251] Third, a cornerstone feature of SARS-CoV-2 is the rapidity of replication and transmission within the human upper respiratory tract. Approximately half of SARS-CoV-2 transmissions occur in the pre-symptomatic phase of infection, before a T cell response has been mounted (in a previously unexposed or unvaccinated individual). The kinetics of SARS-CoV-2 replication and transmission are inconsistent with T cell pressure being a major component of intra-host selection in most individuals and evolutionarily relevant pressure, even though viral escape mutation may arise quickly, in acute infection, during the viremic phase. Combined, these virological, immunological, and epidemiological factors make it unlikely that SARS-CoV-2 will escape human T cell responses at the population level. All of that being said, it is still possible that escape from T cell epitope recognition may occur in individual immunocompromised patients, some of whom have high levels of viral replication for >120 days, and that the virus can undergo extensive mutation in the individual during that time.

### Example 16: TCR Repertoires

[0252] Several studies also addressed TCR repertoires and attempted to establish a link between epitope recognition and particular TCR sequences. More specifically, a seminal study by Gittelman et al. (101) obtained TCR sequence information from the entire municipality of Vo′ (Italy) during the initial surge of SARS-CoV-2 infections, and detected notable correlations with disease severity and other characteristics. Snyder et al. (33) expanded the approach and inferred several epitopes linked to recognition by specific TCRs, and also built a classifier to diagnose infection based solely on TCR sequencing from blood samples. Along the same lines, Shomuradova et al. (32) also observed specific TCR motifs, in some cases shared across multiple donors, and Ferretti et al. (8) sorted epitope specific T cells and used single cell sequencing to define paired TCR a and TCR R chains expressed by these T cells. Gangaev et al. also provided TCR sequences recognizing a defined SARS-CoV-2 epitope (9).

[0253] In conclusion, given the large number of different epitopes recognized in the context of a myriad of different HLA types, it will be necessary to compile an extensive catalog of TCR sequences to completely capture the TCR repertoire associated with SARS-CoV-2 responses in humans. In parallel, focusing on the most dominant HLA and epitope combinations is also of interest. Early reports promise that this approach might lead to very interesting diagnostic applications, and yield additional insights on pathogenesis, also in light of the recent Emergency Use Authorization of a TCR-based diagnostic developed by Adaptive Biotech (see: www.fda.gov/media/146478/download).

[0254] Discussion. The inventors reviewed 25 different studies describing the identification of SARS-CoV-2 epitopes recognized by human T cells. The studies defined over 1400 different unique epitopes (382 for CD4 and 1052 for CD8), which are herein annotated in terms of available metadata. The epitope data described here derives from studies with 1197 human subjects (870 COVID-19 and 327 unexposed controls). Twenty studies defined class I/CD8 epitopes, and 9 defined class II/CD4 epitopes. A variety of screening designs and assay methodologies were utilized. Nearly half of the class II studies use overlapping peptides (4/9 studies), and predicted binders were often used for investigating class I epitopes (21/25 studies). A total of 16 studies used ex vivo assays at some stage, and 12 utilized in vitro restimulations, with a few employing both approaches.

[0255] Ten epitope identification studies screened peptides derived from the entire proteome. However, fifteen other studies concentrated on specific subsets of antigens, based on the fact that the main antigenic targets of CD4 and CD8 SARS-CoV-2 T cell responses have been defined by studies utilizing pools of overlapping peptides. Those studies showed that structural proteins (S, M and N) are dominant targets of T cell responses, but ORF3, ORF8, nsp3, nsp4 and nsp12 are also frequently targeted. Within the main antigens, the inventors have used the IEDB's Immunome Browser tool to identify immunodominant regions. These regions are typically pronounced in the case of CD4 recognition, but less so in the case of CD8 responses, which tend to be more evenly distributed across the dominant antigens.

[0256] Epitope identification was performed in different populations and cohorts, to include both SARS-CoV-2 infected and unexposed donors. These cohorts represent considerable heterogeneity as a function of age, gender, disease severity (with severe disease less represented) and time since symptoms onset. However, different ethnicities were not broadly represented and this will be an important knowledge gap to be addressed in future investigations. Related to this issue, HLA restricted epitopes were identified for 30 class I and 45 class II molecules. The median number of epitopes per allele is 15, but ranging from 1 to 219, with a large bias toward the HLA alleles that are more frequently encountered in the general population.

[0257] As mentioned above, over 1400 different epitopes have been identified to date in the peer-reviewed and pre-print literature. A set of 399 more prevalent epitopes are defined by being recognized by 3 or more donors/different studies (110 CD4, 289 CD8). Considering that several antigens and many HLA types are under studied, this highlights a remarkably broad epitope repertoire. From a study by Tarke et al. (34), each individual is conservatively estimated to recognize 15-20 different CD4 and 15-20 different CD8 epitopes. Furthermore, the epitopes recognized are largely different from one individual to the next because of HLA polymorphism. This remarkable breadth of epitope repertoire suggests that immune escape by SARS-CoV-2 variants from T cell recognition at the population level is not a likely scenario.

### Example 17. Potential for Immune Escape by SARS-CoV-2 Variants

[0258] This example relates in general to the field of peptides that are T cell epitopes for coronavirus, including epitopes of SARS-CoV-2 variants such as the Omicron variant, and more particularly, to compositions and methods for the prevention, treatment, diagnosis, kits, and uses of such T cell epitopes, including megapools, for use in detecting and characterizing SARS-CoV-2 specific responses in infection and following vaccination. Table 8 includes SARS-CoV-2 variants from the Omicron variant.

TABLE 8
SARS-CoV-2 variants from the
Omicron variant B.1.1.529.

| SEQ | | |
|---|---|---|
| ID | B.1.1.529 | B1.1.529 |
| NO: | Start | sequence |
| 2571 | 1 | MFVFLVLLPLVSSQC |
| 2572 | 6 | VLLPLVSSQCVNLTT |
| 2573 | 11 | VSSQCVNLTTRTQLP |
| 2574 | 16 | VNLTTRTQLPPAYTN |
| 2575 | 21 | RTQLPPAYTNSFTRG |
| 2576 | 26 | PAYTNSFTRGVYYPD |
| 2577 | 31 | SFTRGVYYPDKVFRS |
| 2578 | 36 | VYYPDKVFRSSVLHS |
| 2579 | 41 | KVFRSSVLHSTQDLF |
| 2580 | 46 | SVLHSTQDLFLPFFS |
| 2581 | 51 | TQDLFLPFFSNVTWF |
| 2582 | 56 | LPFFSNVTWFHVISG |
| 2583 | 61 | NVTWFHVISGTNGTK |
| 2584 | 66 | HVISGTNGTKRFDNP |
| 2585 | 69 | SGTNGTKRFDNPVLP |
| 2586 | 74 | TKRFDNPVLPFNDGV |
| 2587 | 79 | NPVLPFNDGVYFASI |
| 2588 | 84 | FNDGVYFASIEKSNI |
| 2589 | 89 | YFASIEKSNIIRGWI |
| 2590 | 94 | EKSNIIRGWIFGTTL |
| 2591 | 99 | IRGWIFGTTLDSKTQ |
| 2592 | 104 | FGTTLDSKTQSLLIV |
| 2593 | 109 | DSKTQSLLIVNNATN |
| 2594 | 114 | SLLIVNNATNVVIKV |
| 2595 | 119 | NNATNVVIKVCEFQF |
| 2596 | 124 | VVIKVCEFQFCNDPF |
| 2597 | 129 | CEFQFCNDPFLDHKN |
| 2598 | 134 | CNDPFLDHKNNKSWM |
| 2599 | 139 | LDHKNNKSWMESEFR |
| 2600 | 142 | KNNKSWMESEFRVYS |
| 2601 | 146 | SWMESEFRVYSSANN |
| 2602 | 151 | EFRVYSSANNCTFEY |
| 2603 | 156 | SSANNCTFEYVSQPF |
| 2604 | 161 | CTFEYVSQPFLMDLE |
| 2605 | 166 | VSQPFLMDLEGKQGN |
| 2606 | 171 | LMDLEGKQGNFKNLR |
| 2607 | 176 | GKQGNFKNLREFVFK |
| 2608 | 181 | FKNLREFVFKNIDGY |
| 2609 | 186 | EFVFKNIDGYFKIYS |
| 2610 | 191 | NIDGYFKIYSKHTPI |
| 2611 | 196 | FKIYSKHTPIIVREP |
| 2612 | 201 | KHTPIIVREPEDLPQ |
| 2613 | 206 | IVREPEDLPQGFSAL |
| 2614 | 211 | EDLPQGFSALEPLVD |
| 2615 | 216 | GFSALEPLVDLPIGI |

### Example 18. T Cell-Based Immunodiagnostic System to Effectively Distinguish SARS-CoV-2 Infection and COVID-19 Vaccination Status

[0259] The present inventors developed an immunodiagnostic T cell assay using a pool of overlapping peptides spanning the entire spike protein in combination with experimentally defined non-spike pools to classify subjects based on their vaccination and infection history. This tool showed high predictive power to discriminate responses based on distinctive COVID-19 immune profiles, including hybrid immunity from breakthrough infections. Using a validation cohort, the inventors demonstrated the clinical applicability of this tool for assessing immune responses in diverse individuals, including those who received different vaccine platforms and at different lengths of time post-vaccination and infection.

[0260] Cohorts associated with known infection and vaccination history. 239 participants were enrolled in the study and classified into five groups based on known vaccination and infection history: (50 non-infected, non-vaccinated (I−V−); 50 infected and non-vaccinated (I+V−); 66 infected and then vaccinated (I+V+); 50 non-infected and vaccinated (I-V+); and 23 vaccinated and then infected (V+I+). For the I+V−, I+V+ and V+I+ groups, SARS-CoV-2 infection was determined by PCR-based testing during the acute phase of infection or verified by serological detection of antibodies against the SARS-CoV-2 Spike protein RBD region at the time of blood donation.

[0261] The study primarily consisted of subjects recruited in San Diego, California (see material and methods for more details). Among individuals with history of COVID-19 disease, the majority were symptomatic mild disease cases, owing to the nature of the study recruitment design. Specifically, 44 donors (88%) for I+V−, 45 donors (90%) for I+V+, and 23 donors (100%) for V+I+ had mild symptoms, 3 donors (6%) of I+V− and I+V+ groups had moderate symptoms, and 3 (6%) and 2 donors (4%) from the I+V− and I+V+ groups, respectively, had severe symptoms. The median days of blood collection post symptom onset (PSO) were 119 (20-308), 354 (57-508) and 32 (18-93) for I+V−, I+V+ and V+I+ groups respectively. For the I−V+, I+V+ and V+I+ groups, the vaccinated subjects received two doses of mRNA vaccines BNT162b2 (Pfizer/BioNTech) or mRNA-1273 (Moderna), as verified by vaccination records and positive plasma SARS-CoV-2 spike protein RBD IgG titers. Similar distribution of Pfizer or Moderna administered vaccines (45%-55%) were present in vaccinated subjects from either the I−V+ or I+V+ group, while in the V+I+ group, 15 (65%) subjects had received the BNT162b2 vaccine, and 8 (35%) the mRNA-1273 vaccine.

[0262] The median days of blood collection post second dose of vaccination (PVD) were 16 (13-190), 32 (7-188) and 163 (55-271) for I−V+, I+V+ and V+I+ groups, respectively. All the I−V− subjects were collected before the attributed pandemic period (2013-2019) and confirmed seronegative with undetectable SARS-CoV-2 Spike protein RBD IgG titers. In all cohorts, the median ages were relatively young (25 (17-64), 42 (19-67), 40 (21-74), 38 (21-73), 30 (22-68) for I−V−, I+V−, I−V+, I+V+ and V+I+ groups respectively), with the female gender well represented and different ethnicities represented. In this study, participants were further divided in an exploratory cohort (120 donors), an independent validation cohort (96 donors) and a third cohort of breakthrough infections (V+I+; 23 donors).

[0263] Differential SARS-CoV-2 CD4+ T cell responses in unexposed, convalescent, and vaccinated subjects. To detect SARS-CoV-2 T-cell reactivity, the inventors previously routinely utilized a pool of overlapping peptides spanning the entire spike (S) sequence (253 peptides) and a pool of predicted HLA Class II binders from the Remainder (R) of the genome (CD4R; (221 peptides) (Grifoni et al., 2020b). Here to further optimize detection of non-Spike reactivity, the inventors designed epitope pools based on Experimentally (E) defined epitopes, from the non-spike sequences of the SARS-CoV-2 proteome. The CD4RE and CD8RE megapools (MP) consisted of 284 and 621 peptides respectively. A pool of epitopes derived from an unrelated ubiquitous pathogen (EBV) (Carrasco Pro et al., 2015) was used as a specificity control.

TABLE 9
Detailed peptide sequences information
of CD4RE megapool.

| SEQ | | | | | |
|---|---|---|---|---|---|
| ID | | Anti- | | | Domi- |
| NO: | Description | gen | Start | End | nant |
| 2616 | FYVYSRVKNLNSSRV | E | 56 | 70 | Yes |
| 2617 | QFAYANRNRFLYIIK | M | 36 | 50 | Yes |
| 2618 | VLAAVYRINWITGGI | M | 66 | 80 | Yes |
| 2619 | YRINWITGGIAIAMA | M | 71 | 85 | Yes |
| 2620 | CLVGLMWLSYFIASF | M | 86 | 100 | Yes |
| 2621 | MWLSYFIASFRLFAR | M | 91 | 105 | Yes |
| 2622 | TNILLNVPLHGTILT | M | 116 | 130 | Yes |
| 2623 | SELVIGAVILRGHLR | M | 136 | 150 | Yes |
| 2624 | GAVILRGHLRIAGHHLGR | M | 141 | 158 | Yes |
| 2625 | LRGHLRIAGHHLGRC | M | 145 | 159 | Yes |
| 2626 | RGHLRIAGHHLGRCD | M | 146 | 160 | Yes |
| 2627 | IAGHHLGRCDIKDLP | M | 151 | 165 | Yes |
| 2628 | LGRCDIKDLPKEITV | M | 156 | 170 | Yes |
| 2629 | IKDLPKEITVATSRT | M | 161 | 175 | Yes |
| 2630 | KEITVATSRTLSYYK | M | 166 | 180 | Yes |
| 2631 | TSRTLSYYKLGASQRVA | M | 172 | 188 | Yes |
| 2632 | SRTLSYYKLGASQRV | M | 173 | 187 | Yes |
| 2633 | LSYYKLGASQRVAGD | M | 176 | 190 | Yes |
| 2634 | SYYKLGASQRVAGDS | M | 177 | 191 | Yes |
| 2635 | LGASQRVAGDSGFAA | M | 181 | 195 | Yes |
| 2636 | SGFAAYSRYRIGNYK | M | 191 | 205 | Yes |
| 2637 | ASWFTALTQHGKEDL | N | 50 | 64 | Yes |
| 2638 | SWFTALTQHGKEDLK | N | 51 | 65 | Yes |
| 2639 | DDQIGYYRRATRRIR | N | 81 | 95 | Yes |
| 2640 | IGYYRRATRRIRGGD | N | 84 | 98 | Yes |
| 2641 | YYRRATRRIRGGDGK | N | 86 | 100 | Yes |
| 2642 | MKDLSPRWYFYYLGT | N | 101 | 115 | Yes |
| 2643 | RWYFYYLGTGPEAGL | N | 107 | 121 | Yes |
| 2644 | NKDGIIWVATEGALN | N | 126 | 140 | Yes |
| 2645 | KDGIIWVATEGALNT | N | 127 | 141 | Yes |
| 2646 | AIVLQLPQGTTLPKG | N | 156 | 170 | Yes |
| 2647 | AGNGGDAALALLLLD | N | 211 | 225 | Yes |
| 2648 | DAALALLLLDRLNQL | N | 216 | 230 | Yes |
| 2649 | LLLLDRLNQLESKMS | N | 221 | 235 | Yes |
| 2650 | AAEASKKPRQKRTAT | N | 251 | 265 | Yes |
| 2651 | KKPRQKRTATKAYNV | N | 256 | 270 | Yes |
| 2652 | KRTATKAYNVTQAFG | N | 261 | 275 | Yes |
| 2653 | KAYNVTQAFGRRGPE | N | 266 | 280 | Yes |
| 2654 | LIRQGTDYKHWPQIA | N | 291 | 305 | Yes |
| 2655 | YKHWPQIAQFAPSAS | N | 298 | 312 | Yes |
| 2656 | WPQIAQFAPSASAFF | N | 301 | 315 | Yes |
| 2657 | ASAFFGMSRIGMEVT | N | 311 | 325 | Yes |
| 2658 | GMEVTPSGTWLTYTGAIKLD | N | 321 | 340 | Yes |
| 2659 | PSGTWLTYTGAIKLD | N | 326 | 340 | Yes |
| 2660 | GTWLTYTGAIKLDDK | N | 328 | 342 | Yes |
| 2661 | FKDQVILLNKHIDAY | N | 346 | 360 | Yes |
| 2662 | ILLNKHIDAYKTFPP | N | 351 | 365 | Yes |
| 2663 | LMIERFVSLAIDAYP | NSP12 | 854 | 868 | Yes |
| 2664 | LDDFVEIIKSQDLSV | NSP15 | 299 | 313 | Yes |
| 2665 | KVTFFPDLNGDVVAI | NSP3 | 1138 | 1152 | Yes |
| 2666 | KHFYWFFSNYLKRRV | NSP4 | 388 | 402 | Yes |
| 2667 | NRYFRLTLGVYDYLV | NSP6 | 232 | 246 | Yes |
| 2668 | INVFAFPFTIYSLLL | ORF10 | 4 | 18 | Yes |
| 2669 | FMRIFTIGTVTLKQG | ORF3a | 4 | 18 | Yes |
| 2670 | KKRWQLALSKGVHFV | ORF3a | 66 | 80 | Yes |
| 2671 | LYLYALVYFLQSINF | ORF3a | 106 | 120 | Yes |
| 2672 | QSINFVRIIMRLWLC | ORF3a | 116 | 130 | Yes |
| 2673 | IWNLDYIINLIIKNL | ORF6 | 26 | 40 | Yes |
| 2674 | QEEVQELYSPIFLIV | ORF7a | 90 | 104 | Yes |
| 2675 | TQHQPYVVDDPCPIH | ORF8 | 26 | 40 | Yes |
| 2676 | YVVDDPCPIHFYSKW | ORF8 | 31 | 45 | Yes |
| 2677 | PCPIHFYSKWYIRVG | ORF8 | 36 | 50 | Yes |
| 2678 | FYSKWYIRVGARKSA | ORF8 | 41 | 55 | Yes |
| 2679 | SKWYIRVGARKSAPL | ORF8 | 43 | 57 | Yes |
| 2680 | YIRVGARKSAPLIEL | ORF8 | 46 | 60 | Yes |
| 2681 | IGNYTVSCLPFTINC | ORF8 | 76 | 90 | Yes |
| 2682 | FTINCQEPKLGSLVV | ORF8 | 86 | 100 | Yes |
| 2683 | GSLVVRCSFYEDFLE | ORF8 | 96 | 110 | Yes |
| 2684 | RCSFYEDFLEYHDVR | ORF8 | 101 | 115 | Yes |
| 2686 | SEETGTLIVNSVLLF | E | 6 | 20 | No |
| 2687 | FLLVTLAILTALRLC | E | 26 | 40 | No |
| 2688 | LAILTALRLCAYCCN | E | 31 | 45 | No |
| 2689 | EELKKLLEQWNLVIG | M | 11 | 25 | No |
| 2690 | LLEQWNLVIGFLFLT | M | 16 | 30 | No |
| 2691 | NLVIGFLFLTWICLL | M | 21 | 35 | No |
| 2692 | FLFLTWICLLQFAYA | M | 26 | 40 | No |
| 2693 | WICLLQFAYANRNRF | M | 31 | 45 | No |
| 2694 | NRNRFLYIIKLIFLW | M | 41 | 55 | No |
| 2695 | LYIIKLIFLWLLWPV | M | 46 | 60 | No |
| 2696 | LIFLWLLWPVTLACF | M | 51 | 65 | No |
| 2697 | LLWPVTLACFVLAAV | M | 56 | 70 | No |
| 2698 | ITGGIAIAMACLVGL | M | 76 | 90 | No |
| 2699 | AIAMACLVGLMWLSY | M | 81 | 95 | No |
| 2700 | FIASFRLFARTRSMW | M | 96 | 110 | No |
| 2701 | RLFARTRSMWSFNPE | M | 101 | 115 | No |
| 2702 | TRSMWSFNPETNILL | M | 106 | 120 | No |
| 2703 | SFNPETNILLNVPLH | M | 111 | 125 | No |
| 2704 | NVPLHGTILTRPLLE | M | 121 | 135 | No |
| 2705 | GTILTRPLLESELVI | M | 126 | 140 | No |
| 2706 | RPLLESELVIGAVIL | M | 131 | 145 | No |
| 2707 | GAVILRGHLRIAGHH | M | 141 | 155 | No |
| 2708 | LRIAGHHLGRCDIKD | M | 149 | 163 | No |
| 2709 | ATSRTLSYYKLGASQ | M | 171 | 185 | No |
| 2710 | RVAGDSGFAAYSRYR | M | 186 | 200 | No |
| 2711 | YSRYRIGNYKLNTDH | M | 196 | 210 | No |
| 2712 | IGNYKLNTDHSSSSD | M | 201 | 215 | No |
| 2713 | LNTDHSSSSDNIALL | M | 206 | 220 | No |
| 2714 | PQNQRNAPRITFGGP | N | 6 | 20 | No |
| 2715 | NAPRITFGGPSDSTG | N | 11 | 25 | No |
| 2716 | TFGGPSDSTGSNQNG | N | 16 | 30 | No |
| 2717 | LTQHGKEDLKFPRGQ | N | 56 | 70 | No |
| 2718 | FPRGQGVPINTNSSP | N | 66 | 80 | No |
| 2719 | GVPINTNSSPDDQIG | N | 71 | 85 | No |
| 2720 | TRRIRGGDGKMKDLS | N | 91 | 105 | No |
| 2721 | GGDGKMKDLSPRWYF | N | 96 | 110 | No |
| 2722 | MKDLSPRWYFYYLGTGPEAG | N | 101 | 120 | No |
| 2723 | PRWYFYYLGTGPEAG | N | 106 | 120 | No |
| 2724 | LPYGANKDGIIWVAT | N | 121 | 135 | No |
| 2725 | IWVATEGALNTPKDH | N | 131 | 145 | No |
| 2726 | EGALNTPKDHIGTRN | N | 136 | 150 | No |
| 2727 | GKGQQQQGQTVTKKS | N | 236 | 250 | No |
| 2728 | KPRQKRTATKAYNVT | N | 257 | 271 | No |
| 2729 | TQAFGRRGPEQTQGN | N | 271 | 285 | No |
| 2730 | RRGPEQTQGNFGDQE | N | 276 | 290 | No |
| 2731 | FGDQELIRQGTDYKH | N | 286 | 300 | No |
| 2732 | TDYKHWPQIAQFAPS | N | 296 | 310 | No |
| 2733 | QFAPSASAFFGMSRI | N | 306 | 320 | No |
| 2734 | AFFGMSRIGMEVTPS | N | 313 | 327 | No |
| 2735 | GMEVTPSGTWLTYTG | N | 321 | 335 | No |
| 2736 | TWLTYTGAIKLDDKDPNF | N | 329 | 346 | No |
| 2737 | LTYTGAIKLDDKDPN | N | 331 | 345 | No |
| 2738 | AIKLDDKDPNFKDQV | N | 336 | 350 | No |
| 2739 | PNFKDQVILLNKHIDAYK | N | 344 | 361 | No |
| 2740 | HIDAYKTFPPTEPKK | N | 356 | 370 | No |
| 2741 | QKKQQTVTLLPAADL | N | 386 | 400 | No |
| 2742 | KQQTVTLLPAADLDDF | N | 388 | 403 | No |
| 2743 | TVILLPAADLDDFSK | N | 391 | 405 | No |
| 2744 | AADLDDFSKQLQQSM | N | 397 | 411 | No |
| 2745 | VLSFCAFAVDAAKAY | NSP10 | 13 | 27 | No |
| 2746 | PDILRVYANLGERVR | NSP12 | 169 | 183 | No |
| 2747 | SLLMPILTLTRALTA | NSP12 | 239 | 253 | No |
| 2748 | HCANFNVLFSTVFPP | NSP12 | 309 | 323 | No |
| 2749 | NVLFSTVFPPTSFGP | NSP12 | 314 | 328 | No |
| 2750 | QDALFAYTKRNVIPT | NSP12 | 524 | 538 | No |
| 2751 | KLLKSIAATRGATVV | NSP12 | 574 | 588 | No |
| 2752 | IAATRGATVVIGTSK | NSP12 | 579 | 593 | No |
| 2753 | YPKCDRAMPNMLRIM | NSP12 | 619 | 633 | No |
| 2754 | RAMPNMLRIMASLVL | NSP12 | 624 | 638 | No |
| 2755 | SHRFYRLANECAQVL | NSP12 | 649 | 663 | No |
| 2756 | SEMVMCGGSLYVKPG | NSP12 | 664 | 678 | No |
| 2757 | FNICQAVTANVNALL | NSP12 | 694 | 708 | No |
| 2758 | AVTANVNALLSTDGN | NSP12 | 699 | 713 | No |
| 2759 | EFYAYLRKHFSMMIL | NSP12 | 744 | 758 | No |
| 2760 | LRKHFSMMILSDDAV | NSP12 | 749 | 763 | No |
| 2761 | GLVASIKNFKSVLYY | NSP12 | 774 | 788 | No |
| 2762 | KTDGTLMIERFVSLA | NSP12 | 849 | 863 | No |
| 2763 | FVSLAIDAYPLTKHP | NSP12 | 859 | 873 | No |
| 2764 | IDAYPLTKHPNQEYA | NSP12 | 864 | 878 | No |
| 2765 | DVFHLYLQYIRKLHD | NSP12 | 879 | 893 | No |
| 2766 | TSHKLVLSVNPYVCN | NSP13 | 37 | 51 | No |
| 2767 | ELHLSWEVGKPRPPL | NSP13 | 162 | 176 | No |
| 2768 | PRPPLNRNYVFTGYR | NSP13 | 172 | 186 | No |
| 2769 | FTGYRVTKNSKVQIG | NSP13 | 182 | 196 | No |
| 2770 | VTKNSKVQIGEYTFE | NSP13 | 187 | 201 | No |
| 2771 | VNARLRAKHYVYIGD | NSP13 | 387 | 401 | No |
| 2772 | ISPYNSQNAVASKIL | NSP13 | 512 | 526 | No |
| 2773 | NVNRFNVAITRAKVG | NSP13 | 557 | 571 | No |
| 2774 | NMFITREEAIRHVRA | NSP14 | 71 | 85 | No |
| 2775 | REEAIRHVRAWIGFD | NSP14 | 76 | 90 | No |
| 2776 | PLMYKGLPWNVVRIK | NSP14 | 151 | 165 | No |
| 2777 | EIIKSQDLSVVSKVV | NSP15 | 304 | 318 | No |
| 2778 | TQLCQYLNTLTLAVP | NSP16 | 48 | 62 | No |
| 2779 | AVMSLKEGQINDMIL | NSP16 | 258 | 272 | No |
| 2780 | KEGQINDMILSLLSK | NSP16 | 263 | 277 | No |
| 2781 | RENNRVVISSDVLVN | NSP16 | 283 | 297 | No |
| 2782 | PLNSIIKTIQPRVEK | NSP2 | 96 | 110 | No |
| 2783 | EEIAIILASFSASTS | NSP2 | 291 | 305 | No |
| 2784 | SPLYAFASEAARVVR | NSP2 | 351 | 365 | No |
| 2785 | AITILDGISQYSLRL | NSP2 | 386 | 400 | No |
| 2786 | QTFFKLVNKFLALCA | NSP2 | 496 | 510 | No |
| 2787 | GETFVTHSKGLYRKC | NSP2 | 526 | 540 | No |
| 2788 | ADAVIKTLQPVSELL | NSP3 | 58 | 72 | No |
| 2789 | ESDDYIATNGPLKVG | NSP3 | 268 | 282 | No |
| 2790 | IATNGPLKVGGSCVL | NSP3 | 273 | 287 | No |
| 2791 | SGHNLAKHCLHVVGP | NSP3 | 288 | 302 | No |
| 2792 | NLYDKLVSSFLEMKS | NSP3 | 363 | 377 | No |
| 2793 | ENLLLYIDINGNLHP | NSP3 | 433 | 447 | No |
| 2794 | KSAFYILPSIISNEK | NSP3 | 532 | 546 | No |
| 2795 | RFYFYTSKTTVASLI | NSP3 | 603 | 617 | No |
| 2796 | EAARYMRSLKVPATV | NSP3 | 643 | 657 | No |
| 2797 | LPNDDTLRVEAFEYY | NSP3 | 803 | 817 | No |
| 2798 | TLRVEAFEYYHTTDP | NSP3 | 808 | 822 | No |
| 2799 | HTTDPSFLGRYMSAL | NSP3 | 818 | 832 | No |
| 2800 | SFLGRYMSALNHTKK | NSP3 | 823 | 837 | No |
| 2801 | YMSALNHTKKWKYPQ | NSP3 | 828 | 842 | No |
| 2802 | NHTKKWKYPQVNGLT | NSP3 | 833 | 847 | No |
| 2803 | ESPFVMMSAPPAQYE | NSP3 | 983 | 997 | No |
| 2804 | YCIDGALLTKSSEYK | NSP3 | 1028 | 1042 | No |
| 2805 | DNFKFVCDNIKFADD | NSP3 | 1108 | 1122 | No |
| 2806 | LNQLTGYKKPASREL | NSP3 | 1123 | 1137 | No |
| 2807 | GYKKPASRELKVTFF | NSP3 | 1128 | 1142 | No |
| 2808 | ASRELKVTFFPDLNG | NSP3 | 1133 | 1147 | No |
| 2809 | PDLNGDVVAIDYKHY | NSP3 | 1143 | 1157 | No |
| 2810 | TPSFKKGAKLLHKPI | NSP3 | 1158 | 1172 | No |
| 2811 | VWHVNNATNKATYKP | NSP3 | 1173 | 1187 | No |
| 2812 | MAAYVDNSSLTIKKP | NSP3 | 1278 | 1292 | No |
| 2813 | NELSRVLGLKTLATH | NSP3 | 1293 | 1307 | No |
| 2814 | TFTRSTNSRIKASMP | NSP3 | 1363 | 1377 | No |
| 2815 | TNSRIKASMPTTIAK | NSP3 | 1368 | 1382 | No |
| 2816 | NTVKSVGKFCLEASF | NSP3 | 1383 | 1397 | No |
| 2817 | LEASFNYLKSPNFSK | NSP3 | 1393 | 1407 | No |
| 2818 | PNFSKLINIIIWFLL | NSP3 | 1403 | 1417 | No |
| 2819 | GSLIYSTAALGVLMS | NSP3 | 1423 | 1437 | No |
| 2820 | ISSFKWDLTAFGLVA | NSP3 | 1493 | 1507 | No |
| 2821 | WDLTAFGLVAEWFLA | NSP3 | 1498 | 1512 | No |
| 2822 | FGLVAEWFLAYILFT | NSP3 | 1503 | 1517 | No |
| 2823 | FDAYVNTFSSTFNVP | NSP3 | 1773 | 1787 | No |
| 2824 | SHNIALIWNVKDFMS | NSP3 | 1888 | 1902 | No |
| 2825 | KGGKIVNNWLKQLIK | NSP4 | -2 | 12 | No |
| 2826 | LFVAAIFYLITPVHV | NSP4 | 18 | 32 | No |
| 2827 | AVITREVGFVVPGLP | NSP4 | 93 | 107 | No |
| 2828 | VPGLPGTILRTTNGD | NSP4 | 103 | 117 | No |
| 2829 | FLHFLPRVFSAVGNI | NSP4 | 118 | 132 | No |
| 2830 | DTRYVLMDGSIIQFP | NSP4 | 188 | 202 | No |
| 2831 | SIVAGGIVAIVVTCL | NSP4 | 283 | 297 | No |
| 2832 | FGEYSHVVAFNTLLF | NSP4 | 308 | 322 | No |
| 2833 | NTLLFLMSFTVLCLT | NSP4 | 318 | 332 | No |
| 2834 | PVYSFLPGVYSVIYL | NSP4 | 333 | 347 | No |
| 2835 | YLTFYLTNDVSFLAH | NSP4 | 348 | 362 | No |
| 2836 | SFLAHIQWMVMFTPL | NSP4 | 358 | 372 | No |
| 2837 | IQWMVMFTPLVPFWI | NSP4 | 363 | 377 | No |
| 2838 | MFTPLVPFWITIAYI | NSP4 | 368 | 382 | No |
| 2839 | TIAYIICISTKHFYW | NSP4 | 378 | 392 | No |
| 2840 | CTFLLNKEMYLKLRS | NSP4 | 418 | 432 | No |
| 2841 | LTQYNRYLALYNKYK | NSP4 | 438 | 452 | No |
| 2842 | RYLALYNKYKYFSGA | NSP4 | 443 | 457 | No |
| 2843 | YREAACCHLAKALND | NSP4 | 463 | 477 | No |
| 2844 | CCHLAKALNDFSNSG | NSP4 | 468 | 482 | No |
| 2845 | FSNSGSDVLYQPPQT | NSP4 | 478 | 492 | No |
| 2846 | SDVLYQPPQTSITSA | NSP4 | 483 | 497 | No |
| 2847 | NHNFLVQAGNVQLRV | NSP5 | 63 | 77 | No |
| 2848 | QNCVLKLKVDTANPK | NSP5 | 83 | 97 | No |
| 2849 | LLVLVQSTQWSLFFF | NSP6 | 22 | 36 | No |
| 2850 | SLFFFLYENAFLPFA | NSP6 | 32 | 46 | No |
| 2851 | LCLFLLPSLATVAYF | NSP6 | 67 | 81 | No |
| 2852 | TLVYKVYYGNALDQA | NSP6 | 147 | 161 | No |
| 2853 | DAFKLNIKLLGVGGK | NSP6 | 267 | 281 | No |
| 2854 | RVESSSKLWAQCVQL | NSP7 | 21 | 35 | No |
| 2855 | SKLWAQCVQLHNDIL | NSP7 | 26 | 40 | No |
| 2856 | VLKKLKKSLNVAKSE | NSP8 | 34 | 48 | No |
| 2857 | LIVTALRANSAVKLQ | NSP8 | 184 | 198 | No |
| 2858 | SDFVRATATIPIQAS | ORF3a | 26 | 40 | No |
| 2859 | ALLAVFQSASKIITL | ORF3a | 51 | 65 | No |
| 2860 | KIITLKKRWQLALSK | ORF3a | 61 | 75 | No |
| 2861 | CNLLLLFVTVYSHLL | ORF3a | 81 | 95 | No |
| 2862 | LVAAGLEAPFLYLYA | ORF3a | 96 | 110 | No |
| 2863 | LEAPFLYLYALVYFL | ORF3a | 101 | 115 | No |
| 2864 | LVYFLQSINFVRIIM | ORF3a | 111 | 125 | No |
| 2865 | VRIIMRLWLCWKCRS | ORF3a | 121 | 135 | No |
| 2866 | RLWLCWKCRSKNPLL | ORF3a | 126 | 140 | No |
| 2867 | KNPLLYDANYFLCWH | ORF3a | 136 | 150 | No |
| 2868 | YDANYFLCWHTNCYD | ORF3a | 141 | 155 | No |
| 2869 | FLCWHTNCYDYCIPY | ORF3a | 146 | 160 | No |
| 2870 | TNCYDYCIPYNSVTS | ORF3a | 151 | 165 | No |
| 2871 | YFTSDYYQLYSTQLS | ORF3a | 206 | 220 | No |
| 2872 | TDTGVEHVTFFIYNK | ORF3a | 221 | 235 | No |
| 2873 | EHVTFFIYNKIVDEP | ORF3a | 226 | 240 | No |
| 2874 | FIYNKIVDEPEEHVQ | ORF3a | 231 | 245 | No |
| 2875 | GSSGVVNPVMEPIYD | ORF3a | 251 | 265 | No |
| 2876 | MFHLVDFQVTIAEIL | ORF6 | 1 | 15 | No |
| 2877 | IAEILLIIMRTFKVS | ORF6 | 11 | 25 | No |
| 2878 | AEILLIIMRTFKVSI | ORF6 | 12 | 26 | No |
| 2879 | LIIMRTFKVSIWNLD | ORF6 | 16 | 30 | No |
| 2880 | TFKVSIWNLDYIINL | ORF6 | 21 | 35 | No |
| 2881 | YIINLIIKNLSKSLT | ORF6 | 31 | 45 | No |
| 2882 | MKIILFLALITLATC | ORF7a | 1 | 15 | No |
| 2883 | IILFLALITLATCEL | ORF7a | 3 | 17 | No |
| 2884 | DGVKHVYQLRARSVSPKL | ORF7a | 69 | 86 | No |
| 2885 | VKHVYQLRARSVSPK | ORF7a | 71 | 85 | No |
| 2886 | LYSPIFLIVAAIVFI | ORF7a | 96 | 110 | No |
| 2887 | SPIFLIVAAIVFITL | ORF7a | 98 | 112 | No |
| 2888 | DFYLCFLAFLLFLVL | ORF7b | 8 | 22 | No |
| 2889 | MKFLVFLGIITTVAA | ORF8 | 1 | 15 | No |
| 2890 | FLGIITTVAAFHQEC | ORF8 | 6 | 20 | No |
| 2891 | TTVAAFHQECSLQSC | ORF8 | 11 | 25 | No |
| 2892 | FHQECSLQSCTQHQP | ORF8 | 16 | 30 | No |
| 2893 | SLQSCTQHQPYVVDD | ORF8 | 21 | 35 | No |
| 2894 | ARKSAPLIELCVDEA | ORF8 | 51 | 65 | No |
| 2895 | PLIELCVDEAGSKSP | ORF8 | 56 | 70 | No |
| 2896 | CVDEAGSKSPIQYID | ORF8 | 61 | 75 | No |
| 2897 | IQYIDIGNYTVSCLP | ORF8 | 71 | 85 | No |
| 2898 | QEPKLGSLVVRCSFY | ORF8 | 91 | 105 | No |
| 2899 | EDFLEYHDVRVVLDF | ORF8 | 106 | 120 | No |
| 2900 | DFLEYHDVRVVLDFI | ORF8 | 107 | 121 | No |

TABLE 10
Detailed peptide sequences information
of CD8RE megapool.

| SEQ | | | | |
|---|---|---|---|---|
| ID | | | | |
| NO: | Description | Antigen | Dominant | |
| 2901 | SLVKPSFYV | E | Yes | Allele(s) |
| 2902 | YVYSRVKNL | E | Yes | C*06:02 |
| 2903 | GTITVEELK | M | Yes | A*68:01 |
| 2904 | KLLEQWNLV | M | Yes | A*02:01 |
| 2905 | FLFLTWICL | M | Yes | A*02:01 |
| 2906 | NRFLYIIKL | M | Yes | B*08:01, C*07:02 |
| 2907 | TLACFVLAAV | M | Yes | A*02:01 |
| 2908 | FVLAAVYRI | M | Yes | A*02:01, A*68:02 |
| 2909 | RLFARTRSMW | M | Yes | |
| 2910 | SMWSFNPET | M | Yes | A*02:01 |
| 2911 | SELVIGAVIL | M | Yes | B*40:01 |
| 2912 | AVILRGHLR | M | Yes | A*68:01 |
| 2913 | ATSRTLSYY | M | Yes | A*01:01, A*11:01, B*57:01 |
| 2914 | ATSRTLSYYK | M | Yes | A*11:01, A*30:01 |
| 2915 | RYRIGNYKL | M | Yes | A*24:02, A*30:01 |
| 2916 | QRNAPRITF | N | Yes | B*27:05, C*07:01, C*07:02 |
| 2917 | NTASWFTAL | N | Yes | A*02:01 |
| 2918 | KFPRGQGVPI | N | Yes | |
| 2919 | FPRGQGVPI | N | Yes | B*07:02, B*08:01 |
| 2920 | YYRRATRRIR | N | Yes | |
| 2921 | RIRGGDGKMK | N | Yes | |
| 2922 | KMKDLSPRW | N | Yes | B*57:01 |
| 2923 | LSPRWYFYYL | N | Yes | |
| 2924 | SPRWYFYYL | N | Yes | B*07:02, B*08:01 |
| 2925 | GTGPEAGLPY | N | Yes | |
| 2926 | ATEGALNTPK | N | Yes | A*11:01 |
| 2927 | NPANNAAIVL | N | Yes | B*07:02 |
| 2928 | VLQLPQGTTL | N | Yes | A*02:01 |
| 2929 | LALLLLDRL | N | Yes | A*02:01 |
| 2930 | LLLLDRLNQL | N | Yes | A*02:01 |
| 2931 | LLLDRLNQL | N | Yes | A*02:01 |
| 2932 | QQQQGQTVTK | N | Yes | |
| 2933 | KPRQKRTAT | N | Yes | B*07:02, B*08:01 |
| 2934 | KAYNVTQAF | N | Yes | B*35:01, B*57:01 |
| 2935 | AQFAPSASA | N | Yes | A*02:01 |
| 2936 | AQFAPSASAF | N | Yes | A*24:02, B*15:01 |
| 2937 | ASAFFGMSR | N | Yes | A*11:01, A*68:01 |
| 2938 | GMSRIGMEV | N | Yes | A*02:01 |
| 2939 | MEVTPSGTW | N | Yes | B*44:03 |
| 2940 | MEVTPSGTWL | N | Yes | B*40:01 |
| 2941 | ILLNKHIDA | N | Yes | A*02:01 |
| 2942 | KTFPPTEPK | N | Yes | A*03:01, A*11:01, A*68:01 |
| 2943 | KTFPPTEPKK | N | Yes | A*03:01, A*11:01 |
| 2944 | LPAADLDDF | N | Yes | B*35:01 |
| 2945 | FSKQLQQSM | N | Yes | |
| 2946 | VLSEARQHL | NSP1 | Yes | A*02:01 |
| 2947 | TVLSFCAFAV | NSP10 | Yes | |
| 2948 | DLKGKYVQI | NSP10 | Yes | B*08:01 |
| 2949 | YTMADLVYAL | NSP12 | Yes | |
| 2950 | TMADLVYAL | NSP12 | Yes | A*02:01 |
| 2951 | LLMPILTLT | NSP12 | Yes | |
| 2952 | KLFDRYFKY | NSP12 | Yes | A*03:01 |
| 2953 | FVDGVPFVV | NSP12 | Yes | A*02:01 |
| 2954 | ISDYDYYRY | NSP12 | Yes | |
| 2955 | RQLLFVVEV | NSP12 | Yes | A*02:01 |
| 2956 | VVDKYFDCY | NSP12 | Yes | |
| 2957 | RLYYDSMSY | NSP12 | Yes | B*15:01 |
| 2958 | MVMCGGSLYV | NSP12 | Yes | |
| 2959 | DTDFVNEFY | NSP12 | Yes | A*01:01 |
| 2960 | FYAYLRKHF | NSP12 | Yes | A*24:02 |
| 2961 | RILGAGCFV | NSP12 | Yes | |
| 2962 | LMIERFVSL | NSP12 | Yes | A*02:01 |
| 2963 | LYLQYIRKL | NSP12 | Yes | C*07:02 |
| 2964 | VLQAVGACV | NSP13 | Yes | |
| 2965 | LVLSVNPYV | NSP13 | Yes | |
| 2966 | KLFAAETLK | NSP13 | Yes | A*03:01 |
| 2967 | KLSYGIATV | NSP13 | Yes | A*02:01 |
| 2968 | VVYRGTTTY | NSP13 | Yes | |
| 2969 | VVYRGTTTYK | NSP13 | Yes | A*03:01, A*11:01 |
| 2970 | VYRGTTTYKL | NSP13 | Yes | A*24:02 |
| 2971 | KLNVGDYFV | NSP13 | Yes | A*02:01 |
| 2972 | SSNVANYQK | NSP13 | Yes | |
| 2973 | VYIGDPAQL | NSP13 | Yes | A*24:02, C*07:01 |
| 2974 | IVDTVSALV | NSP13 | Yes | |
| 2975 | IPRRNVATL | NSP13 | Yes | B*07:02, B*08:01 |
| 2976 | VLWAHGFEL | NSP14 | Yes | |
| 2977 | TYACWHHSI | NSP14 | Yes | A*24:02 |
| 2978 | AIMTRCLAV | NSP14 | Yes | |
| 2979 | IEYPIIGDEL | NSP14 | Yes | B*40:01 |
| 2980 | ALLADKFPV | NSP14 | Yes | A*02:01 |
| 2981 | SYATHSDKF | NSP14 | Yes | A*24:02 |
| 2982 | YLDAYNMMI | NSP14 | Yes | A*02:01 |
| 2983 | MMISAGFSL | NSP14 | Yes | A*02:01 |
| 2984 | KQFDTYNLW | NSP14 | Yes | B*15:01 |
| 2985 | NLWNTFTRL | NSP14 | Yes | A*02:01 |
| 2986 | KVDGVDVEL | NSP15 | Yes | A*02:01 |
| 2987 | LLLDDFVEII | NSP15 | Yes | |
| 2988 | MLWCKDGHV | NSP15 | Yes | |
| 2989 | GVAMPNLYK | NSP16 | Yes | |
| 2990 | KMQRMLLEK | NSP16 | Yes | |
| 2991 | YLNTLTLAV | NSP16 | Yes | |
| 2992 | TLIGDCATV | NSP16 | Yes | |
| 2993 | KTIQPRVEK | NSP2 | Yes | A*03:01, A*11:01 |
| 2994 | KLVNKFLAL | NSP2 | Yes | A*02:01 |
| 2995 | VTNNTFTLK | NSP2 | Yes | A*03:01, A*11:01 |
| 2996 | FGDDTVIEV | NSP3 | Yes | A*02:01 |
| 2997 | PTDNYITTY | NSP3 | Yes | A*01:01 |
| 2998 | QEILGTVSW | NSP3 | Yes | B*44:03 |
| 2999 | TTDPSFLGRY | NSP3 | Yes | A*01:01 |
| 3000 | YLATALLTL | NSP3 | Yes | A*02:01 |
| 3001 | SAPPAQYEL | NSP3 | Yes | C*07:01 |
| 3002 | NYMPYFFTL | NSP3 | Yes | A*24:02 |
| 3003 | ASMPTTIAK | NSP3 | Yes | A*11:01, A*30:01 |
| 3004 | ILFTRFFYV | NSP3 | Yes | A*02:01 |
| 3005 | YIFFASFYY | NSP3 | Yes | A*29:02 |
| 3006 | QLMCQPILLL | NSP3 | Yes | |
| 3007 | STFNVPMEK | NSP3 | Yes | A*11:01 |
| 3008 | FLPRVFSAV | NSP4 | Yes | A*02:01 |
| 3009 | FSAVGNICY | NSP4 | Yes | A*01:01 |
| 3010 | SLRPDTRYVL | NSP4 | Yes | C*07:02 |
| 3011 | FLLNKEMYL | NSP4 | Yes | A*02:01 |
| 3012 | TSEDMLNPNY | NSP5 | Yes | A*01:01 |
| 3013 | TPKYKFVRI | NSP5 | Yes | B*08:01 |
| 3014 | VRIQPGQTF | NSP5 | Yes | C*07:01 |
| 3015 | FLNGSCGSV | NSP5 | Yes | |
| 3016 | GTDLEGNFY | NSP5 | Yes | A*01:01 |
| 3017 | VLAWLYAAV | NSP5 | Yes | |
| 3018 | FLNRFTTTL | NSP5 | Yes | |
| 3019 | SAFAMMFVK | NSP6 | Yes | A*11:01 |
| 3020 | FLLPSLATV | NSP6 | Yes | A*02:01 |
| 3021 | MPASWVMRI | NSP6 | Yes | B*07:02 |
| 3022 | KLKDCVMYA | NSP6 | Yes | A*02:01 |
| 3023 | SMWALIISV | NSP6 | Yes | A*02:01 |
| 3024 | KLWAQCVQL | NSP7 | Yes | A*02:01 |
| 3025 | SEFSSLPSY | NSP8 | Yes | B*44:03 |
| 3026 | NTCDGTTFTY | NSP8 | Yes | A*01:01 |
| 3027 | FTYASALWEI | NSP8 | Yes | |
| 3028 | SALWEIQQVV | NSP8 | Yes | A*02:01 |
| 3029 | ALWEIQQVV | NSP8 | Yes | A*02:01 |
| 3030 | ALRANSAVK | NSP8 | Yes | |
| 3031 | CTDDNALAY | NSP9 | Yes | A*01:01 |
| 3032 | CTDDNALAYY | NSP9 | Yes | A*01:01 |
| 3033 | YTELEPPCRF | NSP9 | Yes | A*01:01 |
| 3034 | VTDTPKGPK | NSP9 | Yes | A*11:01 |
| 3035 | MDLFMRIFTI | ORF3a | Yes | |
| 3036 | FVRATATIPI | ORF3a | Yes | |
| 3037 | IPIQASLPF | ORF3a | Yes | B*35:01, B*51:01 |
| 3038 | IVGVALLAVF | ORF3a | Yes | |
| 3039 | ALSKGVHFV | ORF3a | Yes | A*02:01 |
| 3040 | YLYALVYFL | ORF3a | Yes | A*02:01 |
| 3041 | VYFLQSINF | ORF3a | Yes | A*24:02 |
| 3042 | LLYDANYFL | ORF3a | Yes | A*02:01 |
| 3043 | FTSDYYQLY | ORF3a | Yes | A*01:01, A*24:02 |
| 3044 | YYQLYSTQL | ORF3a | Yes | A*24:02, C*07:02 |
| 3045 | HLVDFQVTI | ORF6 | Yes | A*02:01 |
| 3046 | QLRARSVSPK | ORF7a | Yes | A*03:01 |
| 3047 | RARSVSPKL | ORF7a | Yes | B*07:02 |
| 3048 | KLFIRQEEV | ORF7a | Yes | |
| 3049 | VFITLCFTLK | ORF7a | Yes | |
| 3050 | IMLIIFWFSL | ORF7b | Yes | |
| 3051 | IQYIDIGNY | ORF8 | Yes | |
| 3052 | KLGSLVVRC | ORF8 | Yes | A*02:01 |
| 3053 | LEYHDVRVVL | ORF8 | Yes | B*40:01 |
| 3055 | SEETGTLIV | E | No | |
| 3056 | FLLVTLAIL | E | No | A*02:01 |
| 3057 | LVKPSFYVY | E | No | C*07:02 |
| 3058 | FYVYSRVKNL | E | No | A*24:02 |
| 3059 | NGTITVEELK | M | No | A*68:01 |
| 3060 | WICLLQFAY | M | No | |
| 3061 | FAYANRNRF | M | No | B*15:01, B*35:01 |
| 3062 | AYANRNRFL | M | No | A*24:02 |
| 3063 | YANRNRFLY | M | No | A*01:01, B*35:01 |
| 3064 | ANRNRFLYI | M | No | B*08:01 |
| 3065 | RNRFLYIIK | M | No | A*30:01 |
| 3066 | RNRFLYIIKL | M | No | C*07:01 |
| 3067 | RFLYIIKLIF | M | No | A*24:02 |
| 3068 | FLWLLWPVTL | M | No | A*02:01 |
| 3069 | WLLWPVTLA | M | No | A*02:01 |
| 3070 | LLWPVTLAC | M | No | A*02:01 |
| 3071 | LAAVYRINW | M | No | B*57:01 |
| 3072 | LAAVYRINWI | M | No | |
| 3073 | MACLVGLMW | M | No | B*57:01 |
| 3074 | GLMWLSYFI | M | No | A*02:01 |
| 3075 | LSYFIASFR | M | No | A*31:01, A*68:01 |
| 3076 | IASFRLFAR | M | No | A*33:01 |
| 3077 | FRLFARTRSM | M | No | B*08:01 |
| 3078 | RLFARTRSM | M | No | A*30:01 |
| 3079 | SFNPETNIL | M | No | B*08:01 |
| 3080 | SELVIGAVI | M | No | B*44:02 |
| 3081 | ELVIGAVILR | M | No | A*68:01 |
| 3082 | LVIGAVILR | M | No | A*68:01 |
| 3083 | HLRIAGHHL | M | No | B*08:01 |
| 3084 | RIAGHHLGR | M | No | A*03:01 |
| 3085 | LPKEITVAT | M | No | B*07:02 |
| 3086 | TVATSRTLSY | M | No | A*01:01 |
| 3087 | VATSRTLSY | M | No | A*01:01, B*35:01 |
| 3088 | VATSRTLSYY | M | No | A*01:01 |
| 3089 | SQRVAGDSGF | M | No | B*15:01 |
| 3090 | AGDSGFAAY | M | No | A*01:01 |
| 3091 | DSGFAAYSR | M | No | A*68:01 |
| 3092 | YSRYRIGNYK | M | No | A*30:01 |
| 3093 | SSSDNIALL | M | No | A*68:02 |
| 3094 | RPQGLPNNTA | N | No | B*07:02 |
| 3095 | QGLPNNTASW | N | No | B*57:01 |
| 3096 | LPNNTASWF | N | No | B*07:02 |
| 3097 | SPDDQIGYY | N | No | B*35:01 |
| 3098 | MKDLSPRWY | N | No | C*07:01 |
| 3099 | YLGTGPEAGL | N | No | A*02:01 |
| 3100 | AGLPYGANK | N | No | A*30:01 |
| 3101 | LPYGANKDGI | N | No | B*51:01 |
| 3102 | YGANKDGIIW | N | No | B*57:01 |
| 3103 | IIWVATEGA | N | No | A*02:01 |
| 3104 | GTRNPANNA | N | No | A*30:01 |
| 3105 | AEGSRGGSQA | N | No | |
| 3106 | SQASSRSSSR | N | No | |
| 3107 | SSRGTSPAR | N | No | |
| 3108 | KSAAEASKK | N | No | A*11:01 |
| 3109 | RTATKAYNV | N | No | A*02:01 |
| 3110 | QELIRQGTDY | N | No | B*44:02 |
| 3111 | ELIRQGTDY | N | No | A*26:01 |
| 3112 | QFAPSASAFF | N | No | A*24:02 |
| 3113 | FAPSASAFF | N | No | B*35:01 |
| 3114 | APSASAFFGM | N | No | B*07:02 |
| 3115 | SASAFFGMSR | N | No | A*68:01 |
| 3116 | VTPSGTWLTY | N | No | A*30:02 |
| 3117 | TPSGTWLTY | N | No | B*35:01 |
| 3118 | KLDDKDPNF | N | No | A*02:01 |
| 3119 | LLNKHIDAY | N | No | B*15:01 |
| 3120 | YKTFPPTEPK | N | No | A*68:01 |
| 3121 | KKQQTVTLL | N | No | C*07:01 |
| 3122 | HLKDGTCGL | NSP1 | No | B*08:01 |
| 3123 | APHGHVMVEL | NSP1 | No | B*07:02 |
| 3124 | VMVELVAEL | NSP1 | No | A*02:01 |
| 3125 | VPHVGEIPV | NSP1 | No | B*07:02 |
| 3126 | HVGEIPVAY | NSP1 | No | B*15:01 |
| 3127 | IPVAYRKVLL | NSP1 | No | B*07:02 |
| 3128 | VPANSTVLSF | NSP10 | No | B*07:02 |
| 3129 | YLASGGQPI | NSP10 | No | A*02:01 |
| 3130 | VVYRAFDIY | NSP12 | No | B*15:01 |
| 3131 | KVAGFAKFL | NSP12 | No | A*32:01 |
| 3132 | KVAGFAKFLK | NSP12 | No | A*11:01 |
| 3133 | NLIDSYFVV | NSP12 | No | A*02:01 |
| 3134 | YFVVKRHTF | NSP12 | No | A*24:02, B*08:01 |
| 3135 | VPHISRQRL | NSP12 | No | B*07:02 |
| 3136 | TLKEILVTY | NSP12 | No | A*29:02 |
| 3137 | FVENPDILRV | NSP12 | No | A*02:06 |
| 3138 | VENPDILRV | NSP12 | No | B*44:03 |
| 3139 | VENPDILRVY | NSP12 | No | B*44:02 |
| 3140 | VRQALLKTV | NSP12 | No | C*06:02 |
| 3141 | DAMRNAGIV | NSP12 | No | B*51:01 |
| 3142 | SLLMPILTL | NSP12 | No | A*02:01 |
| 3143 | HVDTDLTKPY | NSP12 | No | A*01:01 |
| 3144 | KPYIKWDLL | NSP12 | No | B*07:02 |
| 3145 | RYFKYWDQTY | NSP12 | No | A*24:02 |
| 3146 | ILHCANFNV | NSP12 | No | |
| 3147 | STVFPPTSF | NSP12 | No | B*57:01 |
| 3148 | FPPTSFGPL | NSP12 | No | |
| 3149 | TSFGPLVRK | NSP12 | No | A*03:01 |
| 3150 | SFGPLVRKI | NSP12 | No | A*24:02 |
| 3151 | KIFVDGVPFV | NSP12 | No | A*02:01 |
| 3152 | FVVSTGYHFR | NSP12 | No | A*68:01 |
| 3153 | VVSTGYHFR | NSP12 | No | A*11:01 |
| 3154 | NLHSSRLSF | NSP12 | No | B*08:01 |
| 3155 | QTVKPGNFNK | NSP12 | No | A*11:01 |
| 3156 | FAVSKGFFK | NSP12 | No | A*11:01 |
| 3157 | AAISDYDYY | NSP12 | No | A*01:01 |
| 3158 | AAISDYDYYR | NSP12 | No | A*68:01 |
| 3159 | AISDYDYYR | NSP12 | No | A*11:01 |
| 3160 | YRYNLPTMC | NSP12 | No | C*06:02 |
| 3161 | FVVEVVDKY | NSP12 | No | B*15:01 |
| 3162 | KSAGFPFNK | NSP12 | No | A*03:01 |
| 3163 | KSAGFPFNKW | NSP12 | No | B*57:01 |
| 3164 | ARLYYDSMSY | NSP12 | No | C*07:02 |
| 3165 | FAYTKRNVI | NSP12 | No | B*51:01 |
| 3166 | NVIPTITQM | NSP12 | No | C*07:01 |
| 3167 | IPTITQMNL | NSP12 | No | B*07:02 |
| 3168 | TITQMNLKY | NSP12 | No | A*01:01 |
| 3169 | YAISAKNRAR | NSP12 | No | A*68:01 |
| 3170 | SAKNRARTV | NSP12 | No | C*06:02 |
| 3171 | SICSTMTNR | NSP12 | No | A*33:01 |
| 3172 | IAATRGATV | NSP12 | No | B*51:01 |
| 3173 | ATVVIGTSK | NSP12 | No | A*11:01 |
| 3174 | VENPHLMGWD | NSP12 | No | B*44:02 |
| 3175 | NMLRIMASL | NSP12 | No | |
| 3176 | LRIMASLVL | NSP12 | No | C*07:02 |
| 3177 | IMASLVLAR | NSP12 | No | A*33:01 |
| 3178 | MASLVLARK | NSP12 | No | A*68:01 |
| 3179 | RLANECAQV | NSP12 | No | A*02:01 |
| 3180 | TSSGDATTAY | NSP12 | No | A*01:01 |
| 3181 | VRNLQHRLY | NSP12 | No | C*07:01 |
| 3182 | FVNEFYAYL | NSP12 | No | A*02:01 |
| 3183 | FVNEFYAYLR | NSP12 | No | A*33:01 |
| 3184 | LRKHFSMMI | NSP12 | No | C*06:02 |
| 3185 | LYYQNNVFM | NSP12 | No | A*24:02 |
| 3186 | LVKQGDDYVY | NSP12 | No | B*15:01 |
| 3187 | KQGDDYVYL | NSP12 | No | A*02:01 |
| 3188 | YLPYPDPSRI | NSP12 | No | B*51:01 |
| 3189 | LPYPDPSRIL | NSP12 | No | B*07:02, B*51:01 |
| 3190 | QEYADVFHLY | NSP12 | No | A*29:02, B*44:03 |
| 3191 | YADVFHLYL | NSP12 | No | C*07:02 |
| 3192 | LTNDNTSRYW | NSP12 | No | B*57:01 |
| 3193 | WEPEFYEAM | NSP12 | No | B*40:01 |
| 3194 | AMYTPHTVL | NSP12 | No | A*32:01 |
| 3195 | TPHTVLQAV | NSP12 | No | B*51:01 |
| 3196 | QLYLGGMSYY | NSP13 | No | B*15:01 |
| 3197 | YRGTTTYKL | NSP13 | No | C*06:02 |
| 3198 | TLVPQEHYV | NSP13 | No | |
| 3199 | VPQEHYVRI | NSP13 | No | B*08:01 |
| 3200 | YQKVGMQKY | NSP13 | No | |
| 3201 | FAIGLALYY | NSP13 | No | C*07:02 |
| 3202 | YYPSARIVY | NSP13 | No | A*24:02 |
| 3203 | IPARARVEC | NSP13 | No | B*07:02 |
| 3204 | IPARARVECF | NSP13 | No | B*07:02 |
| 3205 | YVFCTVNAL | NSP13 | No | |
| 3206 | VVNARLRAK | NSP13 | No | A*11:01 |
| 3207 | RPQIGVVREF | NSP13 | No | B*15:01 |
| 3208 | AVASKILGL | NSP13 | No | A*02:01 |
| 3209 | ILGLPTQTV | NSP13 | No | A*02:01 |
| 3210 | EEAIRHVRAW | NSP14 | No | B*44:03 |
| 3211 | LQLGFSTGV | NSP14 | No | |
| 3212 | MYKGLPWNV | NSP14 | No | C*06:02 |
| 3213 | KNLSDRVVFV | NSP14 | No | A*02:01 |
| 3214 | PFMIDVQQW | NSP14 | No | A*24:02 |
| 3215 | LLADKFPVL | NSP14 | No | B*08:01 |
| 3216 | YKIEELFYSY | NSP14 | No | A*01:01 |
| 3217 | KIEELFYSY | NSP14 | No | B*15:01 |
| 3218 | FTDGVCLFW | NSP14 | No | A*01:01 |
| 3219 | SLYVNKHAF | NSP14 | No | B*08:01 |
| 3220 | AGFSLWVYK | NSP14 | No | A*11:01 |
| 3221 | YNLWNTFTRL | NSP14 | No | A*02:01 |
| 3222 | NTFTRLQSL | NSP14 | No | C*07:01 |
| 3223 | SLENVAFNV | NSP15 | No | A*02:01 |
| 3224 | TTLPVNVAF | NSP15 | No | |
| 3225 | TICAPLTVF | NSP15 | No | B*15:01 |
| 3226 | GRVDGQVDL | NSP15 | No | C*07:01 |
| 3227 | KVDGVVQQL | NSP15 | No | A*02:01 |
| 3228 | VVQQLPETY | NSP15 | No | B*15:01 |
| 3229 | KPRSQMEIDF | NSP15 | No | B*07:02 |
| 3230 | FIERYKLEGY | NSP15 | No | A*01:01 |
| 3231 | LLLDDFVEI | NSP15 | No | A*02:01 |
| 3232 | SVVSKVVKV | NSP15 | No | A*02:01 |
| 3233 | VAMPNLYKM | NSP16 | No | B*57:01 |
| 3234 | LPKGIMMNV | NSP16 | No | B*07:02 |
| 3235 | CATVHTANKW | NSP16 | No | B*57:01 |
| 3236 | KLMGHFAWW | NSP16 | No | A*32:01 |
| 3237 | YVMHANYIF | NSP16 | No | A*32:01 |
| 3238 | FWRNTNPIQL | NSP16 | No | C*07:01 |
| 3239 | WRNTNPIQL | NSP16 | No | C*07:01 |
| 3240 | NPIQLSSYSL | NSP16 | No | B*07:02 |
| 3241 | SYSLFDMSKF | NSP16 | No | A*24:02 |
| 3242 | FPLKLRGTA | NSP16 | No | B*07:02 |
| 3243 | FPLKLRGTAV | NSP16 | No | B*08:01 |
| 3244 | LRGTAVMSL | NSP16 | No | C*07:01 |
| 3245 | TFNGECPNF | NSP2 | No | A*24:02 |
| 3246 | GFMGRIRSV | NSP2 | No | C*06:02 |
| 3247 | EEIAIILASF | NSP2 | No | B*44:03 |
| 3248 | ILSPLYAFA | NSP2 | No | A*02:01 |
| 3249 | VRSIFSRTL | NSP2 | No | C*06:02 |
| 3250 | ITILDGISQY | NSP2 | No | B*15:01 |
| 3251 | RLIDAMMFT | NSP2 | No | A*02:01 |
| 3252 | TVYEKLKPV | NSP2 | No | A*02:01 |
| 3253 | EIKESVQTF | NSP2 | No | B*15:01 |
| 3254 | GETLPTEVL | NSP2 | No | B*40:01 |
| 3255 | DTVIEVQGYK | NSP3 | No | A*68:01 |
| 3256 | QGYKSVNITF | NSP3 | No | A*24:02 |
| 3257 | FELDERIDKV | NSP3 | No | A*02:01 |
| 3258 | ELDERIDKV | NSP3 | No | A*02:01 |
| 3259 | VLNEKCSAY | NSP3 | No | B*15:01 |
| 3260 | VELGTEVNEF | NSP3 | No | B*44:02 |
| 3261 | SELLTPLGI | NSP3 | No | B*40:01 |
| 3262 | YLFDESGEF | NSP3 | No | B*15:01 |
| 3263 | FEPSTQYEY | NSP3 | No | B*44:02 |
| 3264 | DDYQGKPLEF | NSP3 | No | A*24:02 |
| 3265 | LEFGATSAAL | NSP3 | No | B*40:01 |
| 3266 | VEVQPQLEM | NSP3 | No | B*40:01 |
| 3267 | LEMELTPVV | NSP3 | No | B*40:01 |
| 3268 | MELTPVVQTI | NSP3 | No | B*40:01 |
| 3269 | TPVVQTIEV | NSP3 | No | B*07:02 |
| 3270 | TIEVNSFSGY | NSP3 | No | A*01:01 |
| 3271 | IEVNSFSGY | NSP3 | No | B*44:02 |
| 3272 | NSFSGYLKL | NSP3 | No | C*06:02 |
| 3273 | YLKLTDNVY | NSP3 | No | B*15:01 |
| 3274 | EAKKVKPTV | NSP3 | No | B*51:01 |
| 3275 | VVVNAANVY | NSP3 | No | B*35:01 |
| 3276 | YIATNGPLK | NSP3 | No | A*11:01 |
| 3277 | YENFNQHEV | NSP3 | No | B*40:01 |
| 3278 | LLSAGIFGA | NSP3 | No | |
| 3279 | GADPIHSLR | NSP3 | No | A*68:01 |
| 3280 | RTNVYLAVF | NSP3 | No | B*57:01 |
| 3281 | AVFDKNLYDK | NSP3 | No | A*03:01, A*11:01 |
| 3282 | LYDKLVSSF | NSP3 | No | A*24:02 |
| 3283 | KLVSSFLEM | NSP3 | No | B*15:01 |
| 3284 | KIAEIPKEEV | NSP3 | No | A*02:01 |
| 3285 | EVKPFITESK | NSP3 | No | A*68:01 |
| 3286 | ESKPSVEQR | NSP3 | No | A*68:01 |
| 3287 | FLTENLLLYI | NSP3 | No | A*02:01 |
| 3288 | LVSDIDITF | NSP3 | No | B*35:01 |
| 3289 | APYIVGDVV | NSP3 | No | B*51:01 |
| 3290 | LTAVVIPTK | NSP3 | No | A*68:01 |
| 3291 | ALRKVPTDNY | NSP3 | No | B*15:01 |
| 3292 | KQEILGTVSW | NSP3 | No | B*44:02, B*44:03 |
| 3293 | MLAHAEETR | NSP3 | No | A*68:01 |
| 3294 | AHAEETRKL | NSP3 | No | C*06:02 |
| 3295 | KLMPVCVET | NSP3 | No | A*02:01 |
| 3296 | AIVSTIQRK | NSP3 | No | A*03:01 |
| 3297 | VVDYGARFY | NSP3 | No | A*01:01 |
| 3298 | SLINTLNDL | NSP3 | No | A*02:01 |
| 3299 | VSSPDAVTAY | NSP3 | No | A*01:01, B*57:01 |
| 3300 | TISLAGSYK | NSP3 | No | A*03:01, A*11:01, A*68:01 |
| 3301 | ISLAGSYKDW | NSP3 | No | B*57:01 |
| 3302 | YYTSNPTTF | NSP3 | No | A*24:02 |
| 3303 | TSNPTTFHL | NSP3 | No | B*57:01 |
| 3304 | HLDGEVITF | NSP3 | No | C*07:02 |
| 3305 | GEVITFDNL | NSP3 | No | B*40:01 |
| 3306 | ITFDNLKTL | NSP3 | No | B*57:01 |
| 3307 | RTIKVFTTV | NSP3 | No | A*02:01 |
| 3308 | NINLHTQVV | NSP3 | No | B*08:01 |
| 3309 | QVVDMSMTY | NSP3 | No | A*01:01, A*11:01 |
| 3310 | MSMTYGQQF | NSP3 | No | B*57:01 |
| 3311 | LRVEAFEYY | NSP3 | No | C*07:01 |
| 3312 | HTTDPSFLGR | NSP3 | No | A*68:01 |
| 3313 | FLGRYMSAL | NSP3 | No | |
| 3314 | YMSALNHTK | NSP3 | No | A*03:01 |
| 3315 | MSALNHTKK | NSP3 | No | A*30:01 |
| 3316 | MSALNHTKKW | NSP3 | No | B*57:01 |
| 3317 | SALNHTKKW | NSP3 | No | B*57:01 |
| 3318 | WKYPQVNGL | NSP3 | No | C*07:01 |
| 3319 | YPQVNGLTSI | NSP3 | No | B*51:01 |
| 3320 | ARAGEAANF | NSP3 | No | C*07:01 |
| 3321 | GEAANFCAL | NSP3 | No | B*40:01 |
| 3322 | LGDVRETMSY | NSP3 | No | A*01:01 |
| 3323 | VRETMSYLF | NSP3 | No | C*07:01 |
| 3324 | VMYMGTLSY | NSP3 | No | A*03:01 |
| 3325 | YTGNYQCGHY | NSP3 | No | A*01:01 |
| 3326 | DVFYKENSY | NSP3 | No | A*26:01 |
| 3327 | YTTTIKPVTY | NSP3 | No | A*01:01, A*26:01 |
| 3328 | EIDPKLDNY | NSP3 | No | A*01:01, A*26:01 |
| 3329 | NYYKKDNSY | NSP3 | No | C*07:02 |
| 3330 | YYKKDNSYF | NSP3 | No | A*24:02 |
| 3331 | ASFDNFKFV | NSP3 | No | A*02:06, C*06:02 |
| 3332 | KFADDLNQL | NSP3 | No | C*07:02 |
| 3333 | ASRELKVTF | NSP3 | No | A*30:01, B*57:01 |
| 3334 | DVVAIDYKHY | NSP3 | No | A*26:01 |
| 3335 | VVAIDYKHY | NSP3 | No | B*15:01 |
| 3336 | DYKHYTPSF | NSP3 | No | A*24:02 |
| 3337 | LHKPIVWHV | NSP3 | No | C*06:02 |
| 3338 | NKATYKPNTW | NSP3 | No | B*57:01 |
| 3339 | SEDAQGMDNL | NSP3 | No | B*40:01 |
| 3340 | EEVVENPTI | NSP3 | No | B*44:03 |
| 3341 | TEVVGDIIL | NSP3 | No | B*40:01 |
| 3342 | AYVDNSSLTI | NSP3 | No | A*24:02 |
| 3343 | LTIKKPNEL | NSP3 | No | B*08:01 |
| 3344 | KPNELSRVL | NSP3 | No | B*07:02, B*08:01 |
| 3345 | NELSRVLGL | NSP3 | No | B*40:01, B*44:02 |
| 3346 | SRVLGLKTL | NSP3 | No | C*07:01 |
| 3347 | SVPWDTIANY | NSP3 | No | A*26:01 |
| 3348 | DTIANYAKPF | NSP3 | No | A*26:01 |
| 3349 | YAKPFLNKV | NSP3 | No | C*06:02 |
| 3350 | RIKASMPTT | NSP3 | No | A*30:01 |
| 3351 | KASMPTTIA | NSP3 | No | A*30:01 |
| 3352 | MPTTIAKNTV | NSP3 | No | B*51:01 |
| 3353 | TTIAKNTVK | NSP3 | No | A*30:01 |
| 3354 | NTVKSVGKF | NSP3 | No | A*26:01 |
| 3355 | KFCLEASFNY | NSP3 | No | A*29:02 |
| 3356 | CLEASFNYL | NSP3 | No | A*02:01 |
| 3357 | KLINIIIWF | NSP3 | No | A*32:01 |
| 3358 | SLIYSTAAL | NSP3 | No | A*02:01 |
| 3359 | STAALGVLM | NSP3 | No | A*26:01 |
| 3360 | MSNLGMPSY | NSP3 | No | B*15:01, B*57:01 |
| 3361 | EGYLNSTNV | NSP3 | No | B*51:01 |
| 3362 | NSTNVTIATY | NSP3 | No | A*26:01 |
| 3363 | STNVTIATY | NSP3 | No | A*01:01, A*32:01 |
| 3364 | ETIQITISSF | NSP3 | No | A*26:01 |
| 3365 | IQITISSFK | NSP3 | No | A*03:01 |
| 3366 | LTAFGLVAEW | NSP3 | No | B*57:01 |
| 3367 | LVAEWFLAY | NSP3 | No | A*26:01, A*29:02 |
| 3368 | AEWFLAYIL | NSP3 | No | B*40:01, B*44:02 |
| 3369 | AEWFLAYILF | NSP3 | No | B*44:02 |
| 3370 | AYILFTRFF | NSP3 | No | A*24:02 |
| 3371 | AVHFISNSW | NSP3 | No | B*57:01 |
| 3372 | HFISNSWLMW | NSP3 | No | A*24:02 |
| 3373 | WLMWLIINL | NSP3 | No | A*02:01 |
| 3374 | LVQMAPISAM | NSP3 | No | B*15:01 |
| 3375 | SAMVRMYIF | NSP3 | No | B*08:01 |
| 3376 | RMYIFFASFY | NSP3 | No | A*03:01 |
| 3377 | SFYYVWKSY | NSP3 | No | A*29:02 |
| 3378 | FYYVWKSYV | NSP3 | No | C*06:02, C*07:02 |
| 3379 | YVYANGGKGF | NSP3 | No | A*26:01, B*15:01 |
| 3380 | DTFCAGSTF | NSP3 | No | A*26:01 |
| 3381 | EVARDLSLQF | NSP3 | No | A*26:01 |
| 3382 | VARDLSLQF | NSP3 | No | B*57:01 |
| 3383 | TVKNGSIHLY | NSP3 | No | A*26:01 |
| 3384 | VKNGSIHLY | NSP3 | No | C*06:02 |
| 3385 | YFDKAGQKTY | NSP3 | No | C*07:02 |
| 3386 | TYERHSLSHF | NSP3 | No | A*24:02 |
| 3387 | YERHSLSHF | NSP3 | No | B*44:02 |
| 3388 | ERHSLSHFV | NSP3 | No | C*06:02 |
| 3389 | SSAKSASVY | NSP3 | No | B*15:01 |
| 3390 | SAKSASVYY | NSP3 | No | B*57:01 |
| 3391 | DSAEVAVKM | NSP3 | No | A*26:01 |
| 3392 | EVAVKMFDAY | NSP3 | No | A*26:01 |
| 3393 | KMFDAYVNTF | NSP3 | No | A*24:02 |
| 3394 | MFDAYVNTF | NSP3 | No | B*08:01 |
| 3395 | AYVNTFSSTF | NSP3 | No | A*24:02 |
| 3396 | YVNTFSSTF | NSP3 | No | A*26:01 |
| 3397 | VPMEKLKTL | NSP3 | No | B*51:01 |
| 3398 | AEAELAKNV | NSP3 | No | B*44:02, B*44:03 |
| 3399 | AELAKNVSL | NSP3 | No | B*44:02 |
| 3400 | SLDNVLSTF | NSP3 | No | A*32:01 |
| 3401 | TFISAARQGF | NSP3 | No | A*24:02 |
| 3402 | DSCNNYMLTY | NSP3 | No | A*01:01 |
| 3403 | VENMTPRDL | NSP3 | No | B*44:03 |
| 3404 | TPRDLGACI | NSP3 | No | B*07:02 |
| 3405 | VAKSHNIAL | NSP3 | No | B*07:02 |
| 3406 | AKSHNIALIW | NSP3 | No | B*57:01 |
| 3407 | QVVNVVTTK | NSP3 | No | A*03:01 |
| 3408 | VVTTKIALK | NSP3 | No | A*03:01 |
| 3409 | KQLIKVTLVF | NSP4 | No | B*15:01 |
| 3410 | FYLITPVHV | NSP4 | No | C*07:02 |
| 3411 | YLITPVHVM | NSP4 | No | A*02:01, B*15:01, C*07:01 |
| 3412 | SEIIGYKAI | NSP4 | No | B*40:01 |
| 3413 | IAAVITREV | NSP4 | No | B*51:01 |
| 3414 | FVVPGLPGT | NSP4 | No | A*02:06 |
| 3415 | VPGLPGTIL | NSP4 | No | B*07:02 |
| 3416 | RTTNGDFLHF | NSP4 | No | B*57:01 |
| 3417 | VLAAECTIF | NSP4 | No | B*15:01 |
| 3418 | DASGKPVPY | NSP4 | No | B*35:01 |
| 3419 | TNVLEGSVAY | NSP4 | No | B*35:01 |
| 3420 | GSVAYESLR | NSP4 | No | A*31:01 |
| 3421 | RPDTRYVLM | NSP4 | No | B*07:02, B*35:01 |
| 3422 | SIIQFPNTY | NSP4 | No | B*35:01 |
| 3423 | WVLNNDYYR | NSP4 | No | A*31:01 |
| 3424 | SLPGVFCGV | NSP4 | No | A*02:01 |
| 3425 | DAVNLLTNM | NSP4 | No | B*51:01 |
| 3426 | IVAGGIVAI | NSP4 | No | A*02:01 |
| 3427 | LAYYFMRFR | NSP4 | No | A*31:01 |
| 3428 | YFMRFRRAF | NSP4 | No | A*24:02 |
| 3429 | FGEYSHVVAF | NSP4 | No | B*40:01 |
| 3430 | SFLPGVYSV | NSP4 | No | A*24:02 |
| 3431 | IYLYLTFYL | NSP4 | No | A*24:02 |
| 3432 | YLTNDVSFLA | NSP4 | No | A*02:01 |
| 3433 | FLAHIQWMV | NSP4 | No | A*02:01, A*02:06 |
| 3434 | MFTPLVPFW | NSP4 | No | A*24:02 |
| 3435 | VPFWITIAY | NSP4 | No | B*35:01 |
| 3436 | WFFSNYLKR | NSP4 | No | A*31:01 |
| 3437 | DVLLPLTQY | NSP4 | No | B*35:01 |
| 3438 | LPLTQYNRY | NSP4 | No | B*35:01 |
| 3439 | GAMDTTSYR | NSP4 | No | A*31:01 |
| 3440 | SNSGSDVLY | NSP4 | No | A*01:01 |
| 3441 | LYQPPQTSI | NSP4 | No | A*24:02, C*07:01 |
| 3442 | AVLQSGFRK | NSP5 | No | |
| 3443 | TANPKTPKY | NSP5 | No | C*07:01 |
| 3444 | NPKTPKYKF | NSP5 | No | B*07:02 |
| 3445 | IQPGQTFSV | NSP5 | No | |
| 3446 | QPGQTFSVL | NSP5 | No | B*07:02 |
| 3447 | SPSGVYQCAM | NSP5 | No | B*07:02 |
| 3448 | ILTSLLVLV | NSP6 | No | A*02:01 |
| 3449 | FLYENAFLP | NSP6 | No | A*02:01 |
| 3450 | LPFAMGIIAM | NSP6 | No | B*07:02 |
| 3451 | MFVKHKHAF | NSP6 | No | C*07:02 |
| 3452 | FVKHKHAFL | NSP6 | No | B*08:01 |
| 3453 | LFLLPSLATV | NSP6 | No | A*02:01 |
| 3454 | FLLPSLATVA | NSP6 | No | A*02:01 |
| 3455 | VYMPASWVM | NSP6 | No | A*24:02 |
| 3456 | RIMTWLDMV | NSP6 | No | A*02:01 |
| 3457 | WLDMVDTSL | NSP6 | No | A*02:01 |
| 3458 | VMYASAVVLL | NSP6 | No | A*24:02 |
| 3459 | MYASAVVLL | NSP6 | No | C*07:02 |
| 3460 | YASAVVLLI | NSP6 | No | C*06:02 |
| 3461 | TLMNVLTLV | NSP6 | No | A*02:01 |
| 3462 | FLARGIVFM | NSP6 | No | A*02:01 |
| 3463 | IFFITGNTL | NSP6 | No | A*24:02 |
| 3464 | GVYDYLVST | NSP6 | No | A*02:01 |
| 3465 | YDYLVSTQEF | NSP6 | No | C*07:02 |
| 3466 | FRYMNSQGL | NSP6 | No | |
| 3467 | GLLPPKNSI | NSP6 | No | A*02:01 |
| 3468 | KLNIKLLGV | NSP6 | No | A*02:01 |
| 3469 | EAFEKMVSL | NSP7 | No | B*08:01 |
| 3470 | SLLSVLLSM | NSP7 | No | A*02:01 |
| 3471 | TFTYASALW | NSP8 | No | A*24:02 |
| 3472 | AWPLIVTAL | NSP8 | No | A*24:02 |
| 3473 | GPKVKYLYF | NSP9 | No | B*08:01 |
| 3474 | YFIKGLNNL | NSP9 | No | C*07:02 |
| 3475 | YINVFAFPF | ORF10 | No | A*02:01 |
| 3476 | NVFAFPFTI | ORF10 | No | A*02:01 |
| 3477 | FTIGTVTLK | ORF3a | No | A*68:01 |
| 3478 | ATIPIQASL | ORF3a | No | B*57:01 |
| 3479 | ALLAVFQSA | ORF3a | No | A*02:01 |
| 3480 | QSASKIITL | ORF3a | No | B*08:01 |
| 3481 | SASKIITLK | ORF3a | No | A*03:01, A*11:01 |
| 3482 | ITLKKRWQL | ORF3a | No | B*08:01, B*57:01 |
| 3483 | TLKKRWQLA | ORF3a | No | B*08:01 |
| 3484 | NLLLLFVTV | ORF3a | No | A*02:01 |
| 3485 | FVTVYSHLL | ORF3a | No | A*02:01 |
| 3486 | TVYSHLLLV | ORF3a | No | A*02:01 |
| 3487 | VAAGLEAPF | ORF3a | No | B*35:01 |
| 3488 | AAGLEAPFLY | ORF3a | No | A*01:01 |
| 3489 | AGLEAPFLY | ORF3a | No | A*29:02 |
| 3490 | GLEAPFLYL | ORF3a | No | A*02:01 |
| 3491 | LEAPFLYLY | ORF3a | No | A*29:02 |
| 3492 | APFLYLYAL | ORF3a | No | B*07:02, B*08:01 |
| 3493 | FLYLYALVY | ORF3a | No | C*07:02 |
| 3494 | LYLYALVYF | ORF3a | No | A*24:02 |
| 3495 | FVRIIMRLW | ORF3a | No | B*57:01 |
| 3496 | VRIIMRLWL | ORF3a | No | C*07:02 |
| 3497 | CRSKNPLLY | ORF3a | No | C*06:02 |
| 3498 | NPLLYDANY | ORF3a | No | B*53:01 |
| 3499 | IPYNSVTSSI | ORF3a | No | |
| 3500 | TTSPISEHDY | ORF3a | No | |
| 3501 | HSYFTSDYY | ORF3a | No | A*29:02 |
| 3502 | YFTSDYYQL | ORF3a | No | C*07:02 |
| 3503 | YFTSDYYQLY | ORF3a | No | A*01:01, A*29:02 |
| 3504 | DYYQLYSTQL | ORF3a | No | A*24:02 |
| 3505 | HVTFFIYNK | ORF3a | No | A*68:01 |
| 3506 | EEHVQIHTI | ORF3a | No | |
| 3507 | IYDEPTTTT | ORF3a | No | C*07:02 |
| 3508 | HLVDFQVTIA | ORF6 | No | A*02:01 |
| 3509 | VTIAEILLI | ORF6 | No | |
| 3510 | LIIMRTFKV | ORF6 | No | B*08:01 |
| 3511 | TFKVSIWNL | ORF6 | No | B*08:01 |
| 3512 | LDYIINLII | ORF6 | No | |
| 3513 | QECVRGTTVL | ORF7a | No | |
| 3514 | YEGNSPFHPL | ORF7a | No | B*40:01 |
| 3515 | EGNSPFHPL | ORF7a | No | B*08:01 |
| 3516 | HPLADNKFAL | ORF7a | No | B*08:01 |
| 3517 | SPIFLIVAA | ORF7a | No | B*07:02 |
| 3518 | QSCTQHQPY | ORF8 | No | A*01:01 |
| 3519 | VDDPCPIHFY | ORF8 | No | A*01:01 |
| 3520 | RVGARKSAPL | ORF8 | No | |
| 3521 | EPKLGSLVV | ORF8 | No | B*07:02 |
| 3522 | EYHDVRVVL | ORF8 | No | A*24:02 |

[0264] T cell reactivity was assessed by the Activation Induced Marker (AIM) assays (da Silva Antunes et al., 2021) and data represented as either absolute magnitude or stimulation index (SI). As shown in FIG. 4A SARS-CoV-2-specific CD4+ T cell responses were detected in all convalescent and/or vaccinated individuals and approximately 50% of non-infected, non-vaccinated individuals. Similar results were observed when responses were plotted as SI (FIG. 4B). Unexposed subjects were associated with significantly lower reactivity as compared to all the other groups (p-values ranging 1.3e-7 to 1.0e-15) and convalescent and vaccinated (I+V+) subjects exhibited higher responses than convalescent (I+V−) subjects (p=0.02 and p=0.04 for absolute magnitude and SI, respectively) or vaccinated (I-V+) subjects (p=0.01 and p=0.02 for absolute magnitude and SI, respectively) (FIGS. 4A, 4B). Importantly, CD4RE responses were able to differentiate convalescent subjects (I+V− or I+V+) from unexposed and vaccinated (I-V+) subjects with p-values ranging 5.6e-8 to 5.7e-12 and vaccinated (I-V+) from infected and vaccinated (I+V+) subjects (p=1.4e-11 and p=1.1e-11 for absolute magnitude and SI, respectively) (FIGS. 4A, 4B). As expected, no statistically significant difference in EBV reactivity was observed when the four groups were compared (FIGS. 4A, 4B).

[0265] Differential SARS-CoV-2 CD8+ T cell and IFNγ FluoroSpot responses in unexposed, convalescent, and vaccinated subjects. SARS-CoV-2 specific CD8+ T cell responses were also broadly detected among all the cohorts studied. CD8+ T cell responses were detected in 90-100% of the convalescent and/or vaccinated individuals and approximately in ¼ of non-infected, non-vaccinated individuals (FIG. 4C). Similar responses were observed when plotted as SI (FIG. 4D). As observed for CD4+ T cell responses, CD8+ T cell responses of unexposed subjects (I−V−) were discriminated from all the other groups (p-values ranging 2.6e-5 to 8.8e-13) and I+V+ infected/vaccinated subjects exhibited higher responses than I+V− convalescent (p=0.03 and p=0.16 for absolute magnitude and SI respectively). Identical results were observed parsing spike-specific responses with CD8RE able to differentiate convalescent (I+V−) from unexposed and vaccinated (I-V+) subjects (p-values ranging 0.02 to 5.9e-6) and vaccinated from infected/vaccinated (I+V+) subjects (p=0.04 and p=0.02 for absolute magnitude and SI, respectively) (FIG. 4C, 4D). When the four groups were compared, no statistically significant difference in EBV reactivity was observed (FIG. 4C, 4D).

[0266] In parallel, an IFN-γ FluoroSpot assay was also employed to evaluate the CD4+ and CD8+ T cell responses using a threshold of 20 IFN γ spot forming cells (SFC) per million PBMC. Responses were detected in many infected or vaccinated individuals, and similar results were observed for Spike, CD4RE or CD8RE when considering both the absolute magnitude or stimulation index, albeit with predictably lower sensitivity and specificity than AIM.

[0267] Improved performance of the CD4RE pool based on experimentally defined epitopes. Results from both AIM and IFN γ FluoroSpot assay demonstrated that the newly developed CD4RE pool had both improved sensitivity and specificity, compared to the previously used CD4R pool of predicted epitopes. In more detail, higher positive CD4+ T cell responses in I+V− (28/30 (93%) vs 26/30 (87%), p=2.0e-4) and I+V+(28/30 (93%) vs 23/30 (77%), p=5.0e-6), and lower non-specific response in I−V− (8/30 (27%) vs 14/30 (47%), p=0.037) and I-V+(2/30 (7%) vs 4/30 (13%), p=0.031) were detected using CD4RE when compared to CD4R in the AIM assay. Similar results were shown by IFN γ FluoroSpot, assay albeit with lower sensitivity compared to AIM. These results demonstrate that the use of experimentally defined, as opposed to predicted epitopes provides higher signal in SARS-CoV-2 exposed subjects, while lowering responses from non-exposed subjects. The fact that experimentally defined epitopes yield better results is consistent with mass spectrometry studies showing the divergence of predicted from HLA-eluted SARS-CoV-2 immunopeptidome (Knierman et al., 2020; Pan et al., 2021; Weingarten-Gabbay et al., 2021).

[0268] Classification of subjects with different exposure history based on Spike and CD4RE reactivity. The inventors reasoned that unexposed (I−V−) subjects would be unreactive to experimentally defined SARS-CoV-2 peptide pools, while uninfected vaccinated (I−V+) subjects should react only to the S pool. The inventors further reasoned that infected (I+V−) subjects should recognize both S and CD4RE, but infected and vaccinated (I+V+) subjects would have a higher relative S reactivity than infected only (I+V−), as is often the case with hybrid immunity (Crotty, 2021), due to exposure to S twice, once during infection and the other during vaccination.

[0269] As shown in FIG. 5A, spike- and CD4RE-specific CD4+ T cell responses derived from the AIM assay were arranged in a two-dimensional plot. Each dot represents a single subject from a total of 120 donors (30 for each of the 4 groups). Optimal cutoffs were established to discriminate the four groups and the positive predictive value (PPV), negative predictive value (NPV), sensitivity and specificity were calculated for each individual group.

[0270] Subjects with spike responses lower than 0.025% were classified predictively as unexposed (I−V−) (FIG. 5A). 29 out of 29 subjects with responses matching this criterion were correctly classified (100% of PPV), while nearly all the actual I−V− subjects (29 out of 30) were found to be associated with responses below the threshold, corresponding to a sensitivity of 96.7% (FIG. 5A, first column in each box). Subjects with spike responses greater than 0.025% and CD4RE responses lower than 0.015% were classified predictively as I−V+. Twenty-eight out of 30 subjects with responses matching this threshold were correctly classified (93.3% of PPV), and 28 out of the 30 I-V+ subjects detected within this threshold (93.3% of sensitivity) (FIG. 5A, third column in each box).

[0271] Lastly, subjects with spike and CD4RE responses above 0.025% and 0.015% respectively, and above or below a diagonal line (log(y)=0.454 log(x)−0.18) were classified as I+V+ or I+V− respectively. 24 out of 27 subjects with responses matching the lower compartment (I+V−) were correctly classified (88.9% of PPV) while 24 out of the 30 I+V− subjects were found to be associated with this threshold (80% of sensitivity) (FIG. 5A, second column in each box). Conversely, the majority of subjects (26 out of 34) with responses matching the upper compartment (I+V+) were correctly classified (76.5% of PPV), while 26 out of the 30 I+V+ subjects studied were found to be associated with this threshold, corresponding to a sensitivity of 86.7% (FIG. 5A, fourth column in each box). Further statistical examinations to assess the robustness of the classification scheme as a potential diagnostic test were performed, specifically assessments of specificity and negative predictive value (PPV). High specificity and NPV were observed for each individual group with a range of 91.1-100% and 93.5-98.9% respectively (FIG. 5A). In summary, good PPV, NPV, sensitivity and specificity values were observed across all the groups with an overall classification accuracy of 89.2%.

[0272] Validation of the classifier in an independent cohort. To confirm the accuracy of this classification scheme, the inventors assessed CD4+ T cell responses in an independent validation cohort of 96 donors (20 for I−V−, I+V−, I+V+, and 36 for I−V). As shown in FIG. 5B, using the same cutoffs as described above for spike and CD4RE responses, similar PPV, NPV, sensitivity and specificity to the experimental cohort was observed across all the groups in the validation cohort with an overall classification accuracy of 88.5%. To further validate the robustness of this classification scheme, the same data (FIG. 5A to 5B) was plotted as a function of the stimulation index. Strikingly, these results paralleled the observations using the absolute magnitude, with a similar overall classification accuracy (86.7% and 85.4% for the exploratory and validation cohorts, respectively).

[0273] Applying the same classification scheme using either absolute magnitude or stimulation index for IFN γ responses yielded an overall classification accuracy of 72.5% and 60.0% respectively. A lower accuracy was observed when CD8+ T cell responses from AIM assay were analyzed, as compared to CD4+ T cell responses (data not shown). Overall, these results demonstrate the feasibility of an integrated classification scheme in assessing CD4+ T cell responses as a clinical immunodiagnostic tool. Importantly, it also displays the potential to discriminate previously undetected infection, including in vaccinated individuals.

[0274] The classification scheme is applicable to different vaccine platforms, and different lengths of time post-infection/post-vaccination. To gain further insights into the applicability of the classification scheme, the inventors sought to further test and validate this tool across vaccine platforms, and longer timepoints post-symptom onset (PSO) or post-vaccination. First, the inventors looked at the response classification as a function of whether vaccinated subjects received BNT 162b2 or mRNA-1273 vaccines. As shown in FIG. 6A the overall classification accuracy when using the different mRNA vaccines was of 89.7%. Specifically, both vaccines showed similar magnitude for both total CD4+ and CD8+ T cell responses in the I−V+ or I+V+ groups (Figure S3A and B). The accuracy of the classification scheme for the different types of vaccines in the combined I-V+ or I+V+ groups was almost identical (88.5% and 90.9% for the mRNA-1273 and BNT162b2 vaccines, respectively) (Table 15).

[0275] Next, the inventors looked at the response classification as a function of the length of time PSO. The overall classification accuracy was of 84.0% (FIG. 6B). No differences were observed in the magnitude of both total CD4+ and CD8+ T cell responses between early (≤180 days) and late (>180 days) timepoints from PSO in either the I+V− or the I+V+ groups. CD4+ T cell reactivity associated with different time from PSO was also plotted as a continuous variable. The accuracy of the classification scheme when considering the different PSO timepoints was 82.0% and 81.8% in the I+V− group and 90.0% and 85.0% in the I+V+ group for the early and late timepoints, respectively (FIG. 6B).

[0276] The inventors also looked at the responses as a function of the length of time from the 2^{nd} dose of vaccination. The overall classification accuracy was of 89.7% (FIG. 6C). No differences were observed in the magnitude of both total CD4+ or CD8+ T cell responses between early (30 days) or late (>30 days) timepoints from the last dose of vaccination in either the I−V+ or the I+V+ groups. CD4+ T cell reactivity associated with different post vaccination dates was also plotted as a continuous variable. The accuracy of the classification scheme when considering the different vaccine timepoints was 93.5% and 90.0% in the I−V+ group and 86.4% and 85.7% in the I+V+ group for the early and late timepoints respectively (FIG. 6C).

[0277] Lastly, as an alternative to the T cell classification scheme, the inventors classified subjects based on spike RBD and nucleocapsid (N) antibody responses. An overall classification accuracy of 69% was observed when previously described standard clinical cutoffs were employed (Dan et al., 2021; Grifoni et al., 2020b; Tarke et al., 2021a). The attempt to classify infected individuals at late PSO timepoints resulted in even lower accuracies, consistent with reports that N positivity is relatively short lived (Dan et al., 2021; Ibarrondo et al., 2020; Ortega et al., 2021). The inventors next examined the possibility that this low classification accuracy might be reflective of suboptimal thresholds. By setting more stringent cutoffs based on the optimal classification of the exploratory cohort, the inventors achieved an overall classification accuracy of 84.2%. However, when the same classification scheme was applied to the validation cohort, the overall accuracy decreased to 52.1%, indicating that the previous value was likely a result of data overfitting. Overall, the use of antibody responses failed to yield a useful classification scheme, unlike the classification scheme using CD4+ T cell responses, which proved to be a robust tool that can accurately classify subjects regardless of the days post-infection/post-vaccination or vaccine administered.

[0278] CD4+ T cell reactivity of subjects associated with breakthrough infections. Breakthrough infections are defined as cases of previously COVID-19 vaccinated individuals associated with positive SARS-CoV-2 PCR tests (Bergwerk et al., 2021; Kustin et al., 2021; Mizrahi et al., 2021). Studies of antibody or T cell responses associated with breakthrough infection are scarce (Collier et al., 2021; Rovida et al., 2021). Breakthrough infection might be associated with increased immune responses as a result of the re-exposure (hybrid immunity) (Collier et al., 2021). In other cases, subjects experiencing breakthrough infections might be associated with general weaker immune responsiveness or decrease of vaccine effectiveness (Klompas, 2021; Mizrahi et al., 2021).

[0279] Here, the inventors assessed spike and CD4RE T cell responses in a group (n=23) of breakthrough infected individuals (V+I+). Responses were compared to the vaccinated (I-V+), infected (I+V−) or infected and then vaccinated (I+V+) groups matching the V+I+ intervals of vaccination and infection (55-271 and 18-93 days, respectively). As shown in FIG. 7A, CD4+ T cell responses from V+I+ subjects were associated with significant higher levels compared to I+V− (p=0.04) and I-V+(p=2.3e-3) subjects and similar magnitude as the I+V+ subjects. CD8+ T cell responses had comparable levels across all the groups (FIG. 7B). Similar to CD4+ T cell responses, spike RBD IgG titers from V+I+ subjects were equivalent to I+V+ subjects and significantly higher than I+V− (p=4.2e-7) and I-V+(p=4.0e-15) subjects (FIG. 7C). Thus, at the population level breakthrough infections are associated with CD4+ T cell and spike IgG responses that resemble hybrid immunity.

[0280] The classification scheme captures heterogeneity in breakthrough infections. At the level of the T cell response classification scheme, individuals who had COVID-19 were effectively segregated from non-infected groups (unexposed and vaccinated). (FIG. 7D). The inventors further expected that the V+I+ breakthrough infections would be classified in the same manner of I+V+ hybrid immunity samples. Approximately two thirds (15/23 subjects) were identified by the same thresholds associated with responses from the I+V+ group (“High responders”), while the remaining third were classified similarly to I+V− subjects (“Low responders”). No obvious difference in terms of age, PSO, PVD, disease severity or length of infection from vaccination was detected between these donors and the high responders sub-group of 15 donors.

[0281] In summary, while T cell responses following breakthrough infections (V+I+) are effectively segregated from the responses of uninfected donors (vaccinated or not) and follow the same pattern of responses of individuals vaccinated following natural infection (I+V+) in the majority of the cases, the classification scheme revealed heterogeneity in the CD4+ T cell responses of breakthrough donors.

[0282] Validation of the classification scheme with whole study cohort. Finally, the inventors summarized the overall accuracy of the classification scheme across the five cohorts used in this study including breakthrough infections. For this purpose, the inventors clustered individuals that had been infected and vaccinated, irrespectively of the event that occurred first, into a single group, i.e. I+V/V+I+ (FIG. 8). When the 239 subjects with distinct COVID-19 status of infection and/or vaccination were combined, the classification scheme achieved a high overall accuracy, either as function of absolute magnitude (86.6%) or SI (82.4%). Also, high specificity and NPV were retained for each individual group with a range of 92.2-98.4% and 88.6-98.4% respectively. These results further illustrate the highly predictive power of this classification scheme and its broad clinical applicability.

[0283] There is a need to understand the roles of SARS-CoV-2 T cell responses as potential correlates of disease outcome, and/or correlates of vaccine protection from infection or severe disease. Herein, the inventors show the results of T cell quantitation based on the determination of relative activity directed against spike and the rest of the genome, by the use of optimized pools of experimentally defined epitopes (CD4RE and CD8RE). The inventors successfully classification of subjects with different COVID-19 vaccination or natural infection history in the 85-90% range of accuracy. The inventors further show that the strategy is applicable to characterizing immune responses in a group of infected vaccinees (i.e., breakthrough infections).

[0284] Although previous reports studied responses to SARS-CoV-2 in either unexposed, COVID-19 infected or vaccinated individuals (da Silva Antunes et al., 2021; Dan et al., 2021; Goel et al., 2021; Grifoni et al., 2020b; Le Bert et al., 2020; Mateus et al., 2021), this is the first demonstration, to the best of the inventors' knowledge, that a simple assay strategy can classify T-cell responses measured simultaneously in five different groups of known COVID-19 status of infection, and/or vaccination. The improved sensitivity and specificity resulted from the concept of considering the relative magnitude of responses against the spike and “rest of the genome” components, which overcomes issues related to the fact that magnitude of responses may wane over time, and also by the inclusion of experimentally defined epitopes, which the inventors show are associated with improved signal and selectivity as compared to previously utilized predicted epitopes.

[0285] The combined use of overlapping spike and CD4RE pools can be used to detect differential and relative reactivity to different SARS-CoV-2 antigens and therefore classify individuals based on SARS-CoV-2 infection and COVID-19 vaccine status, and based on this determination, can be used to inform further diagnostic or therapeutic options for said invidivual(s). More importantly, this approach allows to identify bone fide exposition to SARS-CoV-2 even in individuals that have been vaccinated and thus effectively distinguishing COVID-19 vaccine and infection history. This is of importance, as current COVID-19 diagnostic practices rely heavily on subjectively reported history, clinical records and lab modalities with imperfect performance, leading to limited reliability. For example, in longitudinal vaccination studies it will be important to monitor whether subjects enrolled in the studies might have been associated with asymptomatic infection (Kustin et al., 2021; Mizrahi et al., 2021; Pouwels et al., 2021), or even associated with abortive seronegative infections (Swadling et al., 2021). Also, diagnosis of COVID-19 past infections based on T cell reactivity could be an element considered in the context of booster vaccinations. Monitoring the differential T cell reactivity associated with vaccination versus infection might provide important information in terms of correlating T cell immunity with protection from infection and disease, in a setting where an increasingly high fraction of the general population might have been associated with both vaccination and infection. Continued monitoring of vaccine versus infection-induced T cell responses might be of interest in light of the ongoing controversy over whether vaccination protects against long COVID (Massey et al., Preprint-a; Massey et al., Preprint-b; Taquet et al., Preprint) or immunocompromised vulnerable subjects. Distinguishing T cell responses induced by vaccination versus infection might be also of interest in the context of individual COVID-19 certifications (e.g., “health passes”) and to further characterize individuals that might have been exposed but have not tested positive or had false-negative results for COVID-19 using a molecular or antigen diagnostic test. Finally, distinguishing T cell responses induced by vaccination versus infection is useful in the context of informing further therapy decisions for individuals requiring further vaccination, boosters, or other prophylactic or therapeutic anti-SARS-CoV-2 therapies or treatments as determined by their T cell response levels.

[0286] This study builds on the well-known fact that infected individuals mount a T cell response against multiple SARS-CoV-2 antigens and that individuals vaccinated with mRNA vaccines are mounting only a T cell response to Spike. A detailed classification of T cells response in different categories of vaccinated/infected individuals have not been described and compared as in the current study. Indeed, the use of the developed pools, spanning all the antigens from SARS-CoV-2, allowed for detection of SARS-CoV-2 responses with increased sensitivity and specificity compared to other studies performing T cell assays using only spike or other SARS-CoV-2 antigens (Krishna, Preprint; Kruse et al., 2021; Martinez-Gallo, 2021; Murugesan et al., 2020; Tan et al., 2021; Zelba et al., 2021).

[0287] The inventors also show that similar results were observed when relative versus absolute determinations were employed to measure T cell responses (i.e., using stimulation index or absolute magnitude), which allows for a more generalized use of the classification tool in different flow-cytometer platforms. The robustness of the T cell-based classification scheme was validated in an independent cohort exhibiting identical performances and was applicable to different types of mRNA vaccines, even when considering extended periods of time elapsed from infection and/or vaccination. T cell responses might differ according to the vaccine platform. Also, despite the wide range of time intervals following 2nd vaccine dose between groups, and even when considering extended periods of time elapsed from infection and/or vaccination, the classification scheme performance remained unchanged.

[0288] The strength of the approach is further demonstrated by the fact that T cell responses act as a better classifier than antibody responses, consistent with the notion that antibody responses to N protein are short-lived (Dan et al., 2021; Ibarrondo et al., 2020; Ortega et al., 2021). Also, while applicable to data generated by FluoroSpot cytokine assays, despite the lower intrinsic sensitivity of this assay, the inventors anticipate that this assay strategy will be broadly applicable to other readouts, such as ICS (Cohen et al., 2021; Mateus et al., 2021), and whole blood in an interferon-gamma release assay (IGRA) (Murugesan et al., 2020; Petrone et al., 2021; Tan et al., 2021).

[0289] T cell responses from breakthrough infections were also evaluated, and high levels of CD4+ and CD8+ T cell reactivity were observed. Elevated T cell responsiveness was paralleled by high levels of spike RBD IgG. Interestingly, these responses were of similar magnitude as responses from a group of individuals infected and then vaccinated (I+V+ in this study), whose features are commonly associated with hybrid immunity (Crotty, 2021). Notably, breakthrough infections were also associated with higher CD4+ T cell and spike RBD IgG responses compared to infected only or vaccinated only subjects. These results show that T and B cell reactivity associated with breakthrough infections is increased as a result of re-exposure. However, the classification tool system, also revealed significant heterogeneity in responses in some subjects, possibly linking some breakthrough infections to lower adaptive responses.

[0290] Human Subjects and PBMC isolation. The Institutional Review Boards of the University of California, San Diego (UCSD; 200236X) and the La Jolla Institute for Immunology (LJI; VD-214) approved the protocols used for blood collection for all the subjects who donated at all sites. The vast majority of the blood donations were collected through the UC San Diego Health Clinic and at the La Jolla Institute for Immunology (LJI). Additional samples were obtained from contract research organizations (CRO) under the same LJI IRB approval. All samples with the exception of the I−V− study group were collected during COVID-19 pandemic from 2020-2021. Pre-pandemic blood donations of the I−V− group were performed from 2013-2019. Each participant provided informed consent and was assigned a study identification number with clinical information recorded. Subjects who had a medical history and/or symptoms consistent with COVID-19, but lacked positive PCR-based testing for SARS-CoV-2 and subsequently had negative laboratory-based serologic testing for SARS-CoV-2, were then excluded; i.e., all COVID-19 cases in this study were confirmed cases by SARS-CoV-2 PCR or SARS-CoV-2 serodiagnostics, or both. Adults of all races, ethnicities, ages, and genders were eligible to participate, but the association of gender on the results of the study was not explicitly measured. Study exclusion criteria included lack of willingness to participate, lack of ability to provide informed consent, or a medical contraindication to blood donation (e.g., severe anemia). In all cases, PBMCs were isolated from whole blood by density gradient centrifugation according to manufacturer instructions (Ficoll-Hypaque, Amersham Biosciences, Uppsala, Sweden). Cells were cryopreserved in liquid nitrogen suspended in FBS containing 10% (vol/vol) DMSO (Sigma-Aldrich). Plasma was obtained by centrifugation (400 g for 15 minutes at 4° C.) of whole blood and collection of the upper layer, prior to PBMC isolation and cryopreserved at −80° C.

[0291] Design and production of new SARS-CoV-2 epitope pools. To study T cell responses against SARS-CoV-2, the inventors used a megapool (MP) of 15-mer peptides overlapping by 10 spanning the entire spike protein sequence (253 peptides) as previously described (Grifoni et al., 2020b). For the rest of the SARS-CoV-2 proteome, and in order to design epitope pools with increased HLA coverage and broadly recognized by demographically and geographically diverse populations, experimental defined epitopes from non-spike (R) region of SARS-CoV-2 were selected based on the recent meta-analysis (Grifoni et al., 2021). Briefly, peptides were synthesized and pooled to include both dominant (recognized in 3 or more donors/studies) and subdominant epitopes. To improve specificity, overly short or long ligands which could cause “false positive” signals (Paul et al., 2018), were excluded and only peptides of sizes ranging 15-20 and 9-10 amino acids, respectively in CD4RE and CD8RE pools were included, resulting in the generation of CD4RE and CD8RE MPs with 284 and 621 peptides, respectively. Epitopes were further classified in dominant and subdominant based on the frequency of individual responses as previously described (Grifoni et al., 2021). In addition, detailed information of the MPs composition with peptide sequences, length, ORFs of origin, and HLA coverages. Alternatively, a MP for the remainder genome consisting of dominant HLA class II predicted CD4+ T-cell epitopes (221 peptides), as previously described (Grifoni et al., 2020b) was also used as control. In addition, an EBV pool of previously reported experimental class I and class II epitopes (Carrasco Pro et al., 2015) with 301 peptides was used as positive control. All peptides were synthesized by TC peptide lab (San Diego, CA), pooled and resuspended at a final concentration of 1 mg/mL in DMSO.

[0292] SARS-CoV-2 RBD Spike and Nucleocapsid ELISAs. The SARS-CoV-2 ELISAs have been described in detail previously (Dan et al., 2021). Briefly, 96-well half-area plates (ThermoFisher 3690) were coated with 1 μg/mL of antigen and incubated at 4° C. overnight. Antigens included recombinant SARS-CoV-2 RBD protein obtained from the Saphire laboratory at LJI or recombinant nucleocapsid protein (GenScript Z03488). The next day, plates were blocked with 3% milk in phosphate-buffered saline (PBS) containing 0.05% Tween-20 for 1.5 hours at room temperature. Plasma was heat inactivated at 56° C. for 30 to 60 min. Plasma was diluted in 1% milk containing 0.05% Tween-20 in PBS starting at a 1:3 dilution followed by serial dilutions by three and incubated for 1.5 hours at room temperature. Plates were washed five times with 0.05% PBS-Tween-20. Secondary antibodies were diluted in 1% milk containing 0.05% Tween-20 in PBS. Anti-human IgG peroxidase antibody produced in goat (Sigma A6029) was used at a 1:5,000 dilution. Subsequently, plates were read on Spectramax Plate Reader at 450 nm, and data analysis was performed using SoftMax Pro. End-point titers were plotted for each sample, using background-subtracted data. Negative and positive controls were used to standardize each assay and normalize across experiments. Limit of detection (LOD) was defined as 1:3 of IgG. Spike RBD IgG or nucleocapsid IgG thresholds of positivity (TP) for SARS-CoV-2 infected or COVID-19 vaccinated individuals were established based on uninfected and unvaccinated subjects (I−V−).

[0293] Activation induced cell marker (AIM) assay. The AIM assay was performed as previously described (Mateus et al., 2020). Cryopreserved PBMCs were thawed by diluting the cells in 10 mL complete RPMI 1640 with 5% human AB serum (Gemini Bioproducts) in the presence of benzonase [20 ml/10 ml]. Cells were cultured for 20 to 24 hours in the presence of SARS-CoV-2 specific and EBV pools (1 ug/ml) in 96-wells U bottom plates with 1×10⁶ PBMC per well. An equimolar amount of DMSO was added as a negative control and phytohemagglutinin (PHA, Roche (San Diego, CA) 1 mg/ml) was used as the positive control. The cells were stained with CD3 AF532, CD4 BV605, CD8 BUV496, and Live/Dead Aqua. Activation was measured by the following markers: CD137 APC, OX40 PE-Cy7, and CD69 PE. All samples were acquired on a ZE5 cell analyzer (Biorad laboratories, Hercules, CA) and analyzed with FlowJo software (Tree Star, Ashland, OR).

[0294] CD4+ and CD8+ T cells responses were calculated as percent of total CD4+ (OX40+CD137+) or CD8+ (CD69+CD137+) T cells. The background was removed from the data by subtracting the wells stimulated with DMSO. The Stimulation Index (SI) was calculated by dividing the counts of AIM+ cells after SARS-CoV-2 pools stimulation with the ones in the negative control. A positive response was defined as SI≥2 and AIM⁺ response above the threshold of positivity after background subtraction. The limit of detection (0.01% and 0.03 for CD4+ and CD8+ T cells, respectively) was calculated based on 2 times 95% CI of geomean of negative control (DMSO), and the threshold of positivity (0.02% for CD4+ and 0.05% for CD8+ T cells) was calculated based on 2 times standard deviation of background signals according to previous published studies (Dan et al., 2021; Mateus et al., 2020).

[0295] IFN γ FluoroSpot assay. The FluoroSpot assay was performed as previously described (Tarke et al., 2021a). PBMCs derived from 80 subjects from 4 clinical cohorts (20 each for I−V−, I+V−, I-V+, and I+V+ cohorts) were stimulated in triplicate at a single density of 2×10⁵ cells/well. The cells were stimulated with the different MPs analyzed (1 ug/mL), PHA (10 mg/mL), and DMSO (0.1%) in 96-well plates previously coated with anti-cytokine antibodies for IFN γ, (mAbs 1-D1K; Mabtech, Stockholm, Sweden) at a concentration of 10 ug/mL. After 20-24 hours of incubation at 37° C., 5% CO2, cells were discarded and FluoroSpot plates were washed and further incubated for 2 hours with cytokine antibodies (mAbs 7-B6-1-BAM; Mabtech, Stockholm, Sweden). Subsequently, plates were washed again with PBS/0.05% Tween20 and incubated for 1 hour with fluorophore-conjugated antibodies (Anti-BAM-490). Computer-assisted image analysis was performed by counting fluorescent spots using an AID iSPOT FluoroSpot reader (AIS-diagnostika, Germany). Each megapool was considered positive compared to the background based on the following three criteria: 20 or more IFN γ spot forming cells (SFC) per 10⁶ PBMC after background subtraction (Threshold defined as 2 times standard deviation of background signals), a stimulation index (SI) greater than 2, and statistically different from the background (p<0.05) in either a Poisson or t test as previously described (Oseroff et al., 2005).

[0296] Statistical Analysis. Experimental data were analyzed by GraphPad Prism Version 9 (La Jolla, CA) and Microsoft Excel Version 16.16.27 (Microsoft, Redmond, WA). The statistical details of the experiments are provided in the respective figure legends. Data were analyzed by Wilcoxon test (two-tailed) to compare between two paired groups, and Kruskal-Wallis test adjusted with Dunn's test for multiple comparisons to compare between multiple groups. Data were plotted as geometric mean with geometric SD. p values<0.05 (after adjustment if indicated) were considered statistically significant. For the classification scheme, statistical determinations and metrics were executed as previously described (Trevethan, 2017). Briefly, for each individual group the following calculations were performed: 1) positive predictive value (PPV)=(True Positives)/(True Positives+False Positives); 2) negative predictive value (NPV)=(True Negatives)/(True Negatives+False Negatives); 3) sensitivity=(True Positives)/(True Positives+False Negatives); and 4) specificity=(True Negatives)/(True Negatives+False Positives).

[0297] Study Approval. This study was approved by the Human Subjects Protection Program of the UC San Diego Health under IRB approved protocols (UCSD; 200236X), or under IRB approval (LJI; VD-214) at the La Jolla Institute for Immunology. All donors were able to provide informed consent, or had a legal guardian or representative able to do so. Each participant provided informed consent and was assigned a study identification number with clinical information recorded.

[0298] The present inventors recognized that defining a comprehensive set of epitope specificities is important for several reasons. First, it allows the determination of whether within different SARS-CoV-2 antigens certain regions are immunodominant. This will be important for vaccine design, so as to ensure that vaccine constructs include not only regions targeted by neutralizing antibodies, such as the receptor binding domain (RBD) in the spike (S) region, but also include regions capable of delivering sufficient T cell help and are suitable targets of CD4+ T cell activity. Second, a comprehensive set of epitopes helps define the breadth of responses, in terms of the average number of different CD4+ and CD8+ T cell SARS-CoV-2 epitopes generally recognized by each individual. This is key because some reports have described a T cell repertoire focused on few viral epitopes (Ferretti et al., 2020), which would be concerning for potential viral escape from immune recognition via accumulated mutations that can occur during replication or through viral reassortment. Third, a comprehensive survey of epitopes restricted by a set of different HLAs representative of the diversity present in the general population is important to ensure that results obtained are generally applicable across different ethnicities and racial groups, and also to lay the foundations to examine the potential associations of certain HLAs with COVID-19 severity. Finally, the definition of the epitopes recognized in SARS-CoV-2 infection is relevant in the context of the debate on the potential influence of SARS-CoV-2 cross-reactivity with endemic “Common Cold” Coronaviruses (CCC) (Braun et al., 2020; Le Bert et al., 2020). Several studies have defined the repertoire of SARS-CoV-2 epitopes recognized in unexposed individuals (Braun et al., 2020; Mateus et al., 2020; Nelde et al., 2020), but the correspondence between that repertoire and the epitope repertoire elicited by SARS-CoV-2 infection has not been previously evaluated.

[0299] The present inventors provide a comprehensive map of epitopes recognized by CD4+ and CD8+ T cell responses across the entire SARS-CoV-2 viral proteome. Importantly, these epitopes have been characterized in the context of a broad set of HLA alleles using a direct ex vivo, cytokine-independent, approach.

[0300] The present inventors used a combined experimental and bioinformatics approach to address T cell reactivity to SARS-CoV-2 VOCs. T cell responses from persons recovered from COVID-19 were directly assessed, and T cell responses from recent Moderna mRNA-1273 or Pfizer/BioNTech BNT162b2 vaccinees, for their capacity to recognize peptides derived from the ancestral reference sequence and the B.1.1.7, B1.351, P.1 and CAL.20C variants. As a complementary approach, bioinformatic analyses were used to predict the impact of mutations in the VOCs with sets of previously reported CD4⁺ and CD8⁺ T cell epitopes derived from the ancestral reference sequence.

[0301] The present disclosure describes methods utilizing and compositions comprising or expressing T cell epitopes, T cell epitope-containing peptides, and T cell epitope-containing proteins associated with binding to a subset of the naturally occurring MHC Class II and/or MHC Class I molecules within the human population. Compositions comprising or expressing one or more of the disclosed peptides (e.g., the amino acid sequences set forth in Tables 1 to 10 (SEQ ID NOS: 1 to 3522) or polynucleotides encoding the same, covering different HLA Class II and/or MHC Class I alleles, capable of generating a treatment acting broadly on a population level are disclosed herein. As uses throughout the specification when referring to the use peptide epitopes, the composition can comprise or express 1, 2, 3, 4, 5, 6, 7, 8, 9, 10, 11, 12, 13, 14, 15, 16, 17, 18, 19, 20, 20, 25, 30, 40, 50, 60, 70, 75, 89, 90, 100, 110, 120, 125, 130, 140, 150, 160, 179, 175, 180, 190, 200, 225, 250, 275, 300, 325, or 350, 400, 450, 500, 600, 700, 750, 800, 900, 1000, 1250, 15,500, 1,750, 2000, 2,250, 2,500, 2,750, 3,000, 3,250, 3,500, or 3522 peptides. As the antigen repertoire of MHC Class I and MHC Class II alleles varies from one individual to another and from one ethnic population to another, it is challenging to provide vaccines or peptide or epitopes-based immunotherapies that can be offered to subjects of any geographic region in the world or provide sufficient protection against infection across a wide segment of the populations unless numerous epitopes or peptides are included (e.g., in a vaccine). Taking into consideration the need for a single vaccine formulation that can provide protection across populations, if it desirable to provide a treatment containing or expressing proteins, peptides or epitopes that will provide protection against infection amongst the majority of the worldwide population. Also, taking into consideration the enormous costs and risks in the clinical development of new treatments and the increasing demands from regulatory bodies to meet high standards for toxicity testing, dose justification, safety and efficacy trials, it is desirable to provide treatments containing or expressing as few peptides as possible, but at the same time to be able to treat the majority of subjects in a worldwide population with a single immunotherapy. Such a product should comprise as a first requirement an expression or inclusion of combination of epitopes or peptides that are able to bind the worldwide MHC Class I and/or MHC Class II allele repertoire, and the resulting peptide-MHC complexes should as a second requirement be recognized by the T cells of the subject so as to induce the desired immunological reactions.

[0302] The present disclosure further provides the following methods:

A method for monitoring an immune response relevant to a coronavirus infection comprising one or more steps of:
[0303] i) providing one or more MHC/peptide multimers or a composition comprising at least one MHC/peptide multimer according to the disclosure,
[0304] ii) providing a sample comprising a population of T cells, and
[0305] iii) measuring the presence, frequency, number, activity and/or state of T cells specific for said one or more MHC/peptide multimers,
   thereby monitoring said immune response relevant to a coronavirus infection.
   A method for diagnosing a coronavirus infection comprising one or more steps of:
[0306] i) providing one or more MHC/peptide multimers or a composition comprising at least one MHC/peptide multimer according to the disclosure,
[0307] ii) providing a sample comprising a population of T cells, and
[0308] iii) measuring the presence, frequency, number, activity and/or state of T cells specific for said one or more MHC/peptide multimers,
   thereby diagnosing said coronavirus infection.
   A method for isolation of one or more antigen-specific T cells, said method comprising one or more steps of
[0309] i) providing a sample comprising a population of T cells,
[0310] ii) providing one or more MHC/peptide multimers or a composition comprising at least one MHC/peptide multimer according to the disclosure,
[0311] iii) contacting said MHC/peptide multimers or composition with said sample comprising a population of T cells, and
[0312] iv) isolating T cells specific for said MHC/peptide multimers or composition.
   A method for detecting an antigen-specific T cell response comprising one or more steps of:
[0313] i) providing a sample comprising a population of T cells,
[0314] ii) providing one or more MHC/peptide multimers or a composition comprising at least one MHC/peptide multimer according to the disclosure,
[0315] iii) contacting said MHC/peptide multimers or composition with said sample, and
[0316] iv) measuring the presence, frequency, number, activity and/or state of T cells specific for said MHC/peptide multimers or composition, thereby detecting said antigen-specific T cell response.

[0317] The present disclosure provides improved epitope or peptide combinations for modulating an immune response, for treating a subject for an infection or aberrant immune response, and for use in diagnostic methods and kits comprising such peptide combinations. It is another object of the disclosure to provide epitope or peptide combinations exhibiting very good HLA Class I and Class II coverage in a worldwide population and being immunologically potent in a worldwide population. It is another object of the disclosure to provide epitope or peptide combinations having good cross reactivity to other viral strains, including co-circulating strains (for example, mutants) of coronaviruses, including SARS-CoV-2, common cold coronaviruses, as well as SARS-CoV, MERS, etc. It is another object of the disclosure to provide epitope or peptide combinations of a relatively small number of epitopes or peptides yet obtaining at least 70%, and more preferably around 90-100% donor coverage in a donor cohort representative of a worldwide population. In certain embodiments, this is achieved by selecting one or more immunodominant and/or immunoprevalent proteins (e.g., a SARS-CoV-2 protein) or subsequences, portions, homologues, variants or derivatives thereof for use in the methods and compositions of the present disclosure, wherein said immunodominant and/or immunoprevalent proteins or subsequences, portions, homologues, variants or derivatives thereof comprise two or more epitopes that are immunodominant and/or immunoprevalant. In some embodiments, the two or more epitopes comprise two to ten epitopes and/or polynucleotides encoding the same. Another object of the disclosure is to provide epitope combinations which are so immunologically potent that even at very low doses of epitopes, the percentage of responding donors can be retained at a very high level in a donor cohort representative of a worldwide population. Another object of the disclosure is to provide epitope combinations which have minor risk of inducing IgE-mediated adverse events. An additional object of the disclosure is to provide proteins, peptides, or nucleic acids containing or expressing epitopes or combinations of such proteins, peptides or nucleic acids which have a sufficient solubility profile for being formulated in a pharmaceutical product, preferably which have acceptable estimated in vivo stability. One further objective of the disclosure is to select epitopes for use in the compositions and methods described herein, based on one or both of their immunodominance or immunoprevalence. A still further object of the disclosure is to select such epitopes and epitopes combinations not only in accordance with those embodiments previously described, but also those epitopes and epitope combinations capable of eliciting a B cell response and T cell response (e.g., selecting one or more peptides for use in the methods and compositions described herein capable of generating a T cell and antibody response in a subject).

[0318] Provided herein are methods and compositions for diagnosing, treating, and immunizing against a coronavirus, including methods and compositions of detecting an immune response or immune cells relevant to a coronavirus infection. These methods and compositions include vaccines, diagnostics, therapies, reagents and kits, for modulating, eliciting, or detecting T cells responsive to one or more coronavirus peptides or proteins. The proteins and peptides described herein comprise, consist of, or consist essentially of: one or more amino acid sequences selected from those sequences set forth in Tables 1 to 10 (SEQ ID NOS: 1 to 3522), or a subsequence, portion, homologue, variant or derivative thereof; a fusion protein comprising one or more amino acid sequences selected from those sequences set forth in Tables 1 to 10 (SEQ ID NOS: 1 to 3522); a pool of 2 or more peptides selected from the amino acid sequences set forth in Tables 1 to 10 (SEQ ID NOS: 1 to 3522), or a polynucleotide that encodes one or more peptides or proteins, comprising, consisting of, or consisting essentially of an amino acid sequence selected from those sequences set forth in Tables 1 to 10 (SEQ ID NOS: 1 to 3522), or a subsequence, portion, homologue, variant or derivative thereof. In certain preferred embodiments, the coronavirus is one or more of SARS-CoV-2 or a variant thereof, or SARS, MERS, or a common cold coronavirus strain (e.g., 229E, NL63, HKU1, OC43). Further description and embodiments of such methods and compositions are provided in the definitions provided herein, and a person skilled in the art will recognize that the methods and compositions can be embodied in numerous variations, changes, and substitutions or as may occur to or be understood by one skilled in the art without departing from the disclosure.

[0319] The present invention also includes a method of distinguishing an immune response from a subject that has been vaccinated but not exposed to COVID, or the subject was exposed to COVID but not vaccinated, the method comprising, consisting of, or consisting essentially of: contacting a biological sample from a subject with a composition of any one of claims a fusion protein comprising one or more amino acid sequences selected from those sequences set forth in Tables 1 to 10 (SEQ ID NOS: 1 to 3522); or a pool of 2 or more peptides comprising, consisting of, or consisting essentially of amino acid sequences selected from those sequences set forth in Tables 1 to 10 (SEQ ID NOS: 1 to 3522); or a polynucleotide that encodes one or more peptides or proteins, comprising, consisting of, or consisting essentially of an amino acid sequence selected from those sequences set forth in Tables 1 to 10 (SEQ ID NOS: 1 to 3522), or a subsequence, portion, homologue, variant or derivative thereof; and determining if the composition elicits an immune response from the contacted cells, wherein the presence of an immune response indicates that the subject has been exposed to or infected with SARS-CoV-2 by determining that the immune response is predominantly to a Spike protein, or is to one or more viral antigens other than the Spike protein, wherein a predominant response to Spike protein is indicative that a subject has been vaccinated, or if the response is to one or more viral antigens other than the Spike protein then the subject has been exposed to SARS-CoV-2 but not vaccinated, wherein the peptide or peptides include amino acid sequences set forth in Tables 1 to 10 (SEQ ID NOS: 1 to 3522). The method comprises determining whether the subject has been infected by or exposed to SARS-CoV-2 more than once by determining if the subject elicits a secondary T cell immune response profile that is different from a primary T cell immune response profile. The method further comprises diagnosing a SARS-CoV-2 infection or exposure in a subject, the method comprising contacting a biological sample from a subject with a composition described hereinabove; and determining if the composition elicits a T cell immune response, wherein the T cell immune response identifies that the subject has been infected with or exposed to SARS-CoV-2. The method can be conducted three or more days following the date of suspected infection by or exposure to a coronavirus.

[0320] It is contemplated that any embodiment discussed in this specification can be implemented with respect to any method, kit, reagent, or composition of the invention, and vice versa. Furthermore, compositions of the invention can be used to achieve methods of the invention.

[0321] It will be understood that particular embodiments described herein are shown by way of illustration and not as limitations of the invention. The principal features of this invention can be employed in various embodiments without departing from the scope of the invention. Those skilled in the art will recognize, or be able to ascertain using no more than routine experimentation, numerous equivalents to the specific procedures described herein. Such equivalents are considered to be within the scope of this invention and are covered by the claims.

[0322] All publications and patent applications mentioned in the specification are indicative of the level of skill of those skilled in the art to which this invention pertains. All publications and patent applications are herein incorporated by reference to the same extent as if each individual publication or patent application was specifically and individually indicated to be incorporated by reference.

[0323] The use of the word “a” or “an” when used in conjunction with the term “comprising” in the claims and/or the specification may mean “one,” but it is also consistent with the meaning of “one or more,” “at least one,” and “one or more than one.” The use of the term “or” in the claims is used to mean “and/or” unless explicitly indicated to refer to alternatives only or the alternatives are mutually exclusive, although the disclosure supports a definition that refers to only alternatives and “and/or.” Throughout this application, the term “about” is used to indicate that a value includes the inherent variation of error for the device, the method being employed to determine the value, or the variation that exists among the study subjects.

[0324] As used in this specification and claim(s), the words “comprising” (and any form of comprising, such as “comprise” and “comprises”), “having” (and any form of having, such as “have” and “has”), “including” (and any form of including, such as “includes” and “include”) or “containing” (and any form of containing, such as “contains” and “contain”) are inclusive or open-ended and do not exclude additional, unrecited elements or method steps. In embodiments of any of the compositions and methods provided herein, “comprising” may be replaced with “consisting essentially of” or “consisting of”. As used herein, the phrase “consisting essentially of” requires the specified integer(s) or steps as well as those that do not materially affect the character or function of the claimed invention. As used herein, the term “consisting” is used to indicate the presence of the recited integer (e.g., a feature, an element, a characteristic, a property, a method/process step or a limitation) or group of integers (e.g., feature(s), element(s), characteristic(s), propertie(s), method/process steps or limitation(s)) only.

[0325] The term “or combinations thereof” as used herein refers to all permutations and combinations of the listed items preceding the term. For example, “A, B, C, or combinations thereof” is intended to include at least one of: A, B, C, AB, AC, BC, or ABC, and if order is important in a particular context, also BA, CA, CB, CBA, BCA, ACB, BAC, or CAB. Continuing with this example, expressly included are combinations that contain repeats of one or more item or term, such as BB, AAA, AB, BBC, AAABCCCC, CBBAAA, CABABB, and so forth. The skilled artisan will understand that typically there is no limit on the number of items or terms in any combination, unless otherwise apparent from the context.

[0326] As used herein, words of approximation such as, without limitation, “about”, “substantial” or “substantially” refers to a condition that when so modified is understood to not necessarily be absolute or perfect but would be considered close enough to those of ordinary skill in the art to warrant designating the condition as being present. The extent to which the description may vary will depend on how great a change can be instituted and still have one of ordinary skilled in the art recognize the modified feature as still having the required characteristics and capabilities of the unmodified feature. In general, but subject to the preceding discussion, a numerical value herein that is modified by a word of approximation such as “about” may vary from the stated value by at least ±1, 2, 3, 4, 5, 6, 7, 10, 12 or 15%.

[0327] A person of skill in the art would readily recognize that steps of various above-described methods can be performed by programmed computers. Herein, some embodiments are also intended to cover program storage devices, e.g., digital data storage media, which are machine or computer-readable and encode machine-executable or computer-executable programs of instructions, wherein said instructions perform some or all of the steps of said above-described methods. The program storage devices may be, e.g., digital memories, magnetic storage media such as magnetic disks and magnetic tapes, hard drives, or optically readable digital data storage media. The embodiments are also intended to cover computers programmed to perform said steps of the above-described methods.

[0328] The functions of the various elements shown in the figures, including any functional blocks labeled as “modules”, may be provided through the use of dedicated hardware as well as hardware capable of executing software in association with the appropriate software. When provided by a processor, the functions may be provided by a single dedicated processor, by a single shared processor, or by a plurality of individual processors, some of which may be shared. Moreover, explicit use of the term “module” should not be construed to refer exclusively to hardware capable of executing software, and may implicitly include, without limitation, digital signal processor (DSP) hardware, network processor, application-specific integrated circuit (ASIC), field-programmable gate array (FPGA), read-only memory (ROM) for storing software, random access memory (RAM), and nonvolatile storage. Other hardware, conventional and/or custom, may also be included.

[0329] Additionally, the section headings herein are provided for consistency with the suggestions under 37 CFR 1.77 or otherwise to provide organizational cues. These headings shall not limit or characterize the invention(s) set out in any claims that may issue from this disclosure. Specifically, and by way of example, although the headings refer to a “Field of Invention,” such claims should not be limited by the language under this heading to describe the so-called technical field. Further, a description of technology in the “Background of the Invention” section is not to be construed as an admission that technology is prior art to any invention(s) in this disclosure. Neither is the “Summary” to be considered a characterization of the invention(s) set forth in issued claims. Furthermore, any reference in this disclosure to “invention” in the singular should not be used to argue that there is only a single point of novelty in this disclosure. Multiple inventions may be set forth according to the limitations of the multiple claims issuing from this disclosure, and such claims accordingly define the invention(s), and their equivalents, that are protected thereby. In all instances, the scope of such claims shall be considered on their own merits in light of this disclosure, but should not be constrained by the headings set forth herein.

[0330] All of the compositions and/or methods disclosed and claimed herein can be made and executed without undue experimentation in light of the present disclosure. While the compositions and methods of this invention have been described in terms of preferred embodiments, it will be apparent to those of skill in the art that variations may be applied to the compositions and/or methods and in the steps or in the sequence of steps of the method described herein without departing from the concept, spirit and scope of the invention. All such similar substitutes and modifications apparent to those skilled in the art are deemed to be within the spirit, scope and concept of the invention as defined by the appended claims.

[0331] To aid the Patent Office, and any readers of any patent issued on this application in interpreting the claims appended hereto, applicants wish to note that they do not intend any of the appended claims to invoke paragraph 6 of 35 U.S.C. § 112, U.S.C. § 112 paragraph (f), or equivalent, as it exists on the date of filing hereof unless the words “means for” or “step for” are explicitly used in the particular claim.

[0332] For each of the claims, each dependent claim can depend both from the independent claim and from each of the prior dependent claims for each and every claim so long as the prior claim provides a proper antecedent basis for a claim term or element.

### References—Example 1 TO 16

[0333] 1. DiPiazza A T, Graham B S, Ruckwardt T J. T cell immunity to SARS-CoV-2 following natural infection and vaccination. Biochem Biophys Res Commun. 2020.
[0334] 2. Jordan S C. Innate and Adaptive Immune Responses to SARS-CoV-2 in Humans: Relevance to Acquired Immunity and Vaccine Responses. Clin Exp Immunol. 2021.
[0335] 3. Karlsson A C, Humbert M, Buggert M. The known unknowns of T cell immunity to COVID-19. Sci Immunol. 2020; 5(53).
[0336] 4. Sette A, Crotty S. Pre-existing immunity to SARS-CoV-2: the knowns and unknowns. Nat Rev Immunol. 2020; 20(8):457-8.
[0337] 5. Sette A, Crotty S. Adaptive immunity to SARS-CoV-2 and COVID-19. Cell. 2021.
[0338] 6. Swadling L, Maini M K. T cells in COVID-19 united in diversity. Nature Immunology. 2020; 21(11):1307-8.
[0339] 7. Chen Z, Ruan P, Wang L, Nie X, Ma X, Tan Y. T and B cell Epitope analysis of SARS-CoV-2 S protein based on immunoinformatics and experimental research. J Cell Mol Med. 2021; 25(2):1274-89.
[0340] 8. Ferretti A P, Kula T, Wang Y, Nguyen D M V, Weinheimer A, Dunlap G S, et al. Unbiased Screens Show CD8(+) T Cells of COVID-19 Patients Recognize Shared Epitopes in SARS-CoV-2 that Largely Reside outside the Spike Protein. Immunity. 2020; 53(5):1095-107 e3.
[0341] 9. Gangaev A, Ketelaars S L C, Isaeva O I, Patiwael S, Dopler A, Hoefakker K, et al. Identification and characterization of an immunodominant SARS-CoV-2-specific CD8 T cell response. Journal for ImmunoTherapy of Cancer. 2020; 8(Suppl 3):A513-A4.
[0342] 10. Habel J R, Nguyen T H O, van de Sandt C E, Juno J A, Chaurasia P, Wragg K, et al. Suboptimal SARS-CoV-2-specific CD8(+) T cell response associated with the prominent HLA-A*02:01 phenotype. Proc Natl Acad Sci USA. 2020; 117(39):24384-91.
[0343] 11. Joag V, Wijeyesinghe S, Stolley J M, Quarnstrom C F, Dileepan T, Soerens A G, et al. Cutting Edge: Mouse SARS-CoV-2 Epitope Reveals Infection and Vaccine-Elicited CD8 T Cell Responses. J Immunol. 2021.
[0344] 12. Kared H, Redd A D, Bloch E M, Bonny T S, Sumatoh H R, Kairi F, et al. SARS-CoV-2-specific CD8+ T cell responses in convalescent COVID-19 individuals. J Clin Invest. 2021.
[0345] 13. Keller M D, Harris K M, Jensen-Wachspress M A, Kankate V, Lang H, Lazarski C A, et al. SARS-CoV-2 specific T-cells Are Rapidly Expanded for Therapeutic Use and Target Conserved Regions of Membrane Protein. Blood. 2020.
[0346] 14. Le Bert N, Clapham H E, Tan A T, Chia W N, Tham C Y L, Lim J M, et al. Highly functional virus-specific cellular immune response in asymptomatic SARS-CoV-2 infection. J Exp Med. 2021; 218(5).
[0347] 15. Le Bert N, Clapham H E, Tan A T, Chia W N, Tham C Y L, Lim J M, et al. Highly functional virus-specific cellular immune response in asymptomatic SARS-CoV-2 infection. bioRxiv. 2020.
[0348] 16. Le Bert N, Tan A T, Kunasegaran K, Tham C Y L, Hafezi M, Chia A, et al. SARS-CoV-2-specific T cell immunity in cases of COVID-19 and SARS, and uninfected controls. Nature. 2020; 584(7821):457-62.
[0349] 17. Lee E, Sandgren K, Duette G, Stylianou V V, Khanna R, Eden J S, et al. Identification of SARS-CoV-2 Nucleocapsid and Spike T-cell Epitopes for Assessing T-cell Immunity. J Virol. 2020.
[0350] 18. Mahajan S, Kode V, Bhojak K, Magdalene C M, Lee K, Manoharan M, et al. Immunodominant T-cell epitopes from the SARS-CoV-2 spike antigen reveal robust pre-existing T-cell immunity in unexposed individuals. bioRxiv. 2020:2020.11.03.367375.
[0351] 19. Mateus J, Grifoni A, Tarke A, Sidney J, Ramirez S I, Dan J M, et al. Selective and cross-reactive SARS-CoV-2 T cell epitopes in unexposed humans. Science. 2020; 370(6512):89-94.
[0352] 20. Nelde A, Bilich T, Heitmann J S, Maringer Y, Salih H R, Roerden M, et al. SARS-CoV-2-derived peptides define heterologous and COVID-19-induced T cell recognition. Nat Immunol. 2021; 22(1):74-85.
[0353] 21. Nielsen S S, Vibholm L K, Monrad I, Olesen R, Frattari G S, Pahus M H, et al. SARS-CoV-2 Elicits Robust Adaptive Immune Responses Regardless of Disease Severity. bioRxiv. 2020:2020.10.08.331645.
[0354] 22. Peng Y, Mentzer A J, Liu G, Yao X, Yin Z, Dong D, et al. Broad and strong memory CD4(+) and CD8(+) T cells induced by SARS-CoV-2 in UK convalescent individuals following COVID-19. Nat Immunol. 2020; 21(11):1336-45.
[0355] 23. Poran A, Harjanto D, Malloy M, Rooney M S, Srinivasan L, Gaynor R B. Sequence-based prediction of vaccine targets for inducing T cell responses to SARS-CoV-2 utilizing the bioinformatics predictor RECON. bioRxiv. 2020:2020.04.06.027805.
[0356] 24. Poran A, Harjanto D, Malloy M, Arieta C M, Rothenberg D A, Lenkala D, et al. Sequence-based prediction of SARS-CoV-2 vaccine targets using a mass spectrometry-based bioinformatics predictor identifies immunogenic T cell epitopes. Genome medicine. 2020; 12(1):70.
[0357] 25. Prakash S, Srivastava R, Coulon P-G, Dhanushkodi N R, Chentoufi A A, Tifrea D F, et al. Genome-Wide Asymptomatic B-Cell, CD4<sup>+</sup> and CD8<sup>+</sup> T-Cell Epitopes, that are Highly Conserved Between Human and Animal Coronaviruses, Identified from SARS-CoV-2 as Immune Targets for Pre-Emptive Pan-Coronavirus Vaccines. bioRxiv. 2020:2020.09.27.316018.
[0358] 26. Rha M S, Jeong H W, Ko J H, Choi S J, Seo I H, Lee J S, et al. PD-1-Expressing SARS-CoV-2-Specific CD8(+) T Cells Are Not Exhausted, but Functional in Patients with COVID-19. Immunity. 2021; 54(1):44-52 e3.
[0359] 27. Sahin U, Muik A, Vogler I, Derhovanessian E, Kranz L M, Vormehr M, et al. BNT162b2 induces SARS-CoV-2-neutralising antibodies and T cells in humans. medRxiv. 2020.
[0360] 28. Saini S K, Hersby D S, Tamhane T, Povlsen H R, Hernandez S P A, Nielsen M, et al. SARS-CoV-2 genome-wide mapping of CD8 T cell recognition reveals strong immunodominance and substantial CD8 T cell activation in COVID-19 patients. bioRxiv. 2020:2020.10.19.344911.
[0361] 29. Saini S K, Hersby D S, Tamhane T, Povlsen H R, Amaya Hernandez S P, Nielsen M, et al. SARS-CoV-2 genome-wide T cell epitope mapping reveals immunodominance and substantial CD8(+) T cell activation in COVID-19 patients. Sci Immunol. 2021; 6(58).
[0362] 30. Schulien I, Kemming J, Oberhardt V, Wild K, Seidel L M, Killmer S, et al. Characterization of pre-existing and induced SARS-CoV-2-specific CD8(+) T cells. Nat Med. 2021; 27(1):78-85.
[0363] 31. Sekine T, Perez-Potti A, Rivera-Ballesteros O, Stralin K, Gorin J B, Olsson A, et al. Robust T Cell Immunity in Convalescent Individuals with Asymptomatic or Mild COVID-19. Cell. 2020; 183(1):158-68 e14.
[0364] 32. Shomuradova A S, Vagida M S, Sheetikov S A, Zornikova K V, Kiryukhin D, Titov A, et al. SARS-CoV-2 Epitopes Are Recognized by a Public and Diverse Repertoire of Human T Cell Receptors. Immunity. 2020; 53(6):1245-57 e5.
[0365] 33. Snyder™, Gittelman R M, Klinger M, May D H, Osborne E J, Taniguchi R, et al. Magnitude and Dynamics of the T-Cell Response to SARS-CoV-2 Infection at Both Individual and Population Levels. medRxiv. 2020:2020.07.31.20165647.
[0366] 34. Tarke A, Sidney J, Kidd C K, Dan J M, Ramirez S I, Yu E D, et al. Comprehensive analysis of T cell immunodominance and immunoprevalence of SARS-CoV-2 epitopes in COVID-19 cases. Cell Rep Med. 2021:100204.
[0367] 35. Fleri W, Vaughan K, Salimi N, Vita R, Peters B, Sette A. The Immune Epitope Database: How Data Are Entered and Retrieved. Journal of immunology research. 2017; 2017:5974574.
[0368] 36. Salimi N, Fleri W, Peters B, Sette A. The immune epitope database: a historical retrospective of the first decade. Immunology. 2012; 137(2):117-23.
[0369] 37. Hassert M, Geerling E, Stone E T, Steffen T L, Feldman M S, Dickson A L, et al. mRNA induced expression of human angiotensin-converting enzyme 2 in mice for the study of the adaptive immune response to severe acute respiratory syndrome coronavirus 2. PLoS Pathog. 2020; 16(12):e1009163.
[0370] 38. Takagi A, Matsui M. Identification of HLA-A*02:01-Restricted Candidate Epitopes Derived from the Nonstructural Polyprotein 1a of SARS-CoV-2 That May Be Natural Targets of CD8<sup>+</sup> T Cell Recognition <em>In Vivo</em>. Journal of Virology. 2021; 95(5):e01837-20.
[0371] 39. Knierman M D, Lannan M B, Spindler L J, McMillian C L, Konrad R J, Siegel R W. The Human Leukocyte Antigen Class II Immunopeptidome of the SARS-CoV-2 Spike Glycoprotein. Cell Rep. 2020; 33(9):108454.
[0372] 40. Parker R, Partridge T, Wormald C, Kawahara R, Stalls V, Aggelakopoulou M, et al. Mapping the SARS-CoV-2 spike glycoprotein-derived peptidome presented by HLA class II on dendritic cells. bioRxiv. 2020.
[0373] 41. Weingarten-Gabbay S, Klaeger S, Sarkizova S, Pearlman L R, Chen D Y, Bauer M R, et al. SARS-CoV-2 infected cells present HLA-I peptides from canonical and out-of-frame ORFs. bioRxiv. 2020.
[0374] 42. Prachar M, Justesen S, Steen-Jensen D B, Thorgrimsen S, Jurgons E, Winther O, et al. Identification and validation of 174 COVID-19 vaccine candidate epitopes reveals low performance of common epitope prediction tools. Sci Rep. 2020; 10(1):20465.
[0375] 43. Murphey K, Paul Travers, Mark Walport, and Charles Janeway. Janeway's Immunobiology. 8th ed. New York: Garland Science; 2012 2012.
[0376] 44. Abbas Ak, Andrew H Lichtman, and Shiv Pillai. Cellular and Molecular Immunology. 6 th ed. Piladelphia: Saunders Elsevier; 2007.
[0377] 45. Petersen J, Purcell A W, Rossjohn J. Post-translationally modified T cell epitopes: immune recognition and immunotherapy. J Mol Med (Berl). 2009; 87(11):1045-51.
[0378] 46. Sun L, Middleton D R, Wantuch P L, Ozdilek A, Avci F Y. Carbohydrates as T-cell antigens with implications in health and disease. Glycobiology. 2016; 26(10):1029-40.
[0379] 47. McMichael A J, Gotch F M, Santos-Aguado J, Strominger J L. Effect of mutations and variations of HLA-A2 on recognition of a virus peptide epitope by cytotoxic T lymphocytes. Proc Natl Acad Sci USA. 1988; 85(23):9194-8.
[0380] 48. O'Sullivan D, Arrhenius T, Sidney J, Del Guercio M F, Albertson M, Wall M, et al. On the interaction of promiscuous antigenic peptides with different D R alleles. Identification of common structural motifs. J Immunol. 1991; 147(8):2663-9.
[0381] 49. Greenbaum J, Sidney J, Chung J, Brander C, Peters B, Sette A. Functional classification of class II human leukocyte antigen (HLA) molecules reveals seven different supertypes and a surprising degree of repertoire sharing across supertypes. Immunogenetics. 2011; 63(6):325-35.
[0382] 50. Sidney J, Peters B, Frahm N, Brander C, Sette A. HLA class I supertypes: a revised and updated classification. BMC Immunol. 2008; 9:1.
[0383] 51. Kilgus J, Jardetzky T, Gorga J C, Trzeciak A, Gillessen D, Sinigaglia F. Analysis of the permissive association of a malaria T cell epitope with D R molecules. J Immunol. 1991; 146(1):307-15.
[0384] 52. Panina-Bordignon P, Tan A, Termijtelen A, Demotz S, Corradin G, Lanzavecchia A. Universally immunogenic T cell epitopes: promiscuous binding to human MHC class II and promiscuous recognition by T cells. Eur J Immunol. 1989; 19(12):2237-42.
[0385] 53. Dash P, Fiore-Gartland A J, Hertz T, Wang G C, Sharma S, Souquette A, et al. Quantifiable predictive features define epitope-specific T cell receptor repertoires. Nature. 2017; 547(7661):89-93.
[0386] 54. Glanville J, Huang H, Nau A, Hatton 0, Wagar L E, Rubelt F, et al. Identifying specificity groups in the T cell receptor repertoire. Nature. 2017; 547(7661):94-8.
[0387] 55. Sidney J, Peters B, Sette A. Epitope prediction and identification-adaptive T cell responses in humans. Semin Immunol. 2020; 50:101418.
[0388] 56. Yewdell J W, Bennink J R. Immunodominance in major histocompatibility complex class I-restricted T lymphocyte responses. Annu Rev Immunol. 1999; 17:51-88.
[0389] 57. Oseroff C, Peters B, Pasquetto V, Moutaftsi M, Sidney J, Panchanathan V, et al. Dissociation between epitope hierarchy and immunoprevalence in CD8 responses to vaccinia virus western reserve. J Immunol. 2008; 180(11):7193-202.
[0390] 58. Tan A T, Sodsai P, Chia A, Moreau E, Chng M H, Tham C Y, et al. Immunoprevalence and immunodominance of HLA-Cw*0801-restricted T cell response targeting the hepatitis B virus envelope transmembrane region. J Virol. 2014; 88(2):1332-41.
[0391] 59. Wang X F, Kerzerho J, Adotevi O, Nuyttens H, Badoual C, Munier G, et al. Comprehensive analysis of HLA-D R- and HLA-DP4-restricted CD4+ T cell response specific for the tumor-shared antigen survivin in healthy donors and cancer patients. J Immunol. 2008; 181(1):431-9.
[0392] 60. Assarsson E, Sidney J, Oseroff C, Pasquetto V, Bui H H, Frahm N, et al. A quantitative analysis of the variables affecting the repertoire of T cell specificities recognized after vaccinia virus infection. J Immunol. 2007; 178(12):7890-901.
[0393] 61. Kotturi M F, Peters B, Buendia-Laysa F, Jr., Sidney J, Oseroff C, Botten J, et al. The CD8+ T-cell response to lymphocytic choriomeningitis virus involves the L antigen: uncovering new tricks for an old virus. J Virol. 2007; 81(10):4928-40.
[0394] 62. Yewdell J W. Confronting complexity: real-world immunodominance in antiviral CD8+ T cell responses. Immunity. 2006; 25(4):533-43.
[0395] 63. Hataye J, Moon J J, Khoruts A, Reilly C, Jenkins M K. Naive and memory CD4+ T cell survival controlled by clonal abundance. Science. 2006; 312(5770):114-6.
[0396] 64. Kotturi M F, Scott I, Wolfe T, Peters B, Sidney J, Cheroutre H, et al. Naive precursor frequencies and MHC binding rather than the degree of epitope diversity shape CD8+ T cell immunodominance. J Immunol. 2008; 181(3):2124-33.
[0397] 65. Croft N P, Smith S A, Pickering J, Sidney J, Peters B, Faridi P, et al. Most viral peptides displayed by class I MHC on infected cells are immunogenic. Proc Natl Acad Sci USA. 2019; 116(8):3112-7.
[0398] 66. Paul S, Croft N P, Purcell A W, Tscharke D C, Sette A, Nielsen M, et al. Benchmarking predictions of MHC class I restricted T cell epitopes in a comprehensively studied model system. PLoS Comput Biol. 2020; 16(5):e1007757.
[0399] 67. Demotz S, Grey H M, Sette A. The minimal number of class II MHC-antigen complexes needed for T cell activation. Science. 1990; 249(4972):1028-30.
[0400] 68. Sykulev Y, Joo M, Vturina I, Tsomides T J, Eisen H N. Evidence that a single peptide-MHC complex on a target cell can elicit a cytolytic T cell response. Immunity. 1996; 4(6):565-71.
[0401] 69. Peters B, Nielsen M, Sette A. T Cell Epitope Predictions. Annu Rev Immunol. 2020; 38:123-45.
[0402] 70. Riddell S R, Greenberg P D. Principles for adoptive T cell therapy of human viral diseases. Annu Rev Immunol. 1995; 13:545-86.
[0403] 71. Grifoni A, Weiskopf D, Ramirez S I, Mateus J, Dan J M, Moderbacher C R, et al. Targets of T Cell Responses to SARS-CoV-2 Coronavirus in Humans with COVID-19 Disease and Unexposed Individuals. Cell. 2020; 181(7):1489-501 e15.
[0404] 72. Masopust D, Soerens A G. Tissue-Resident T Cells and Other Resident Leukocytes. Annu Rev Immunol. 2019; 37:521-46.
[0405] 73. Dan J M, Lindestam Arlehamn C S, Weiskopf D, da Silva Antunes R, Havenar-Daughton C, Reiss S M, et al. A Cytokine-Independent Approach To Identify Antigen-Specific Human Germinal Center T Follicular Helper Cells and Rare Antigen-Specific CD4+ T Cells in Blood. J Immunol. 2016; 197(3):983-93.
[0406] 74. Locci M, Havenar-Daughton C, Landais E, Wu J, Kroenke M A, Arlehamn C L, et al. Human circulating PD-1+CXCR3-CXCR5+ memory Tfh cells are highly functional and correlate with broadly neutralizing HIV antibody responses. Immunity. 2013; 39(4):758-69.
[0407] 75. Reiss S, Baxter A E, Cirelli K M, Dan J M, Morou A, Daigneault A, et al. Comparative analysis of activation induced marker (AIM) assays for sensitive identification of antigen-specific CD4 T cells. PLoS One. 2017; 12(10):e0186998.
[0408] 76. Dhanda S K, Vaughan K, Schulten V, Grifoni A, Weiskopf D, Sidney J, et al. Development of a novel clustering tool for linear peptide sequences. Immunology. 2018; 155(3):331-45.
[0409] 77. Paul S, Karosiene E, Dhanda S K, Jurtz V, Edwards L, Nielsen M, et al. Determination of a Predictive Cleavage Motif for Eluted Major Histocompatibility Complex Class II Ligands. Frontiers in immunology. 2018; 9:1795.
[0410] 78. Altmann D M, Boyton R J. SARS-CoV-2 T cell immunity: Specificity, function, durability, and role in protection. Sci Immunol. 2020; 5(49).
[0411] 79. Vita R, Mahajan S, Overton J A, Dhanda S K, Martini S, Cantrell J R, et al. The Immune Epitope Database (IEDB): 2018 update. Nucleic Acids Res. 2019; 47(D1):D339-D43.
[0412] 80. Dhanda S K, Vita R, Ha B, Grifoni A, Peters B, Sette A. ImmunomeBrowser: a tool to aggregate and visualize complex and heterogeneous epitopes in reference proteins. Bioinformatics. 2018; 34(22):3931-3.
[0413] 81. Gonzalez-Galarza F F, McCabe A, Santos E, Jones J, Takeshita L, Ortega-Rivera N D, et al. Allele frequency net database (AFND) 2020 update: gold-standard data classification, open access genotype data and new query tools. Nucleic Acids Res. 2020; 48(D1):D783-D8.
[0414] 82. Robinson J, Barker D J, Georgiou X, Cooper M A, Flicek P, Marsh S G E. IPD-IMGT/HLA Database. Nucleic Acids Res. 2020; 48(D1):D948-D55.
[0415] 83. McKinney D M, Southwood S, Hinz D, Oseroff C, Arlehamn C S, Schulten V, et al. A strategy to determine HLA class II restriction broadly covering the D R, D P, and D Q allelic variants most commonly expressed in the general population. Immunogenetics. 2013; 65(5):357-70.
[0416] 84. Sette A, Sidney J. Nine major HLA class I supertypes account for the vast preponderance of HLA-A and -B polymorphism. Immunogenetics. 1999; 50(3-4):201-12.
[0417] 85. Weiskopf D, Angelo M A, de Azeredo E L, Sidney J, Greenbaum J A, Fernando A N, et al. Comprehensive analysis of dengue virus-specific responses supports an HLA-linked protective role for CD8+ T cells. Proc Natl Acad Sci USA. 2013; 110(22):E2046-53.
[0418] 86. Goulder P J, Walker B D. HIV and HLA class I: an evolving relationship. Immunity. 2012; 37(3):426-40.
[0419] 87. Bacher P, Rosati E, Esser D, Martini G R, Saggau C, Schiminsky E, et al. Low-Avidity CD4(+) T Cell Responses to SARS-CoV-2 in Unexposed Individuals and Humans with Severe COVID-19. Immunity. 2020; 53(6):1258-71 e5.
[0420] 88. Lipsitch M, Grad Y H, Sette A, Crotty S. Cross-reactive memory T cells and herd immunity to SARS-CoV-2. Nat Rev Immunol. 2020; 20(11):709-13.
[0421] 89. Sagar M, Reifler K, Rossi M, Miller N S, Sinha P, White L F, et al. Recent endemic coronavirus infection is associated with less-severe COVID-19. The Journal of Clinical Investigation. 2021; 131(1).
[0422] 90. Sette A, Crotty S. Author Correction: Pre-existing immunity to SARS-CoV-2: the knowns and unknowns. Nat Rev Immunol. 2020; 20(10):644.
[0423] 91. Sagar M, Reifler K, Rossi M, Miller N S, Sinha P, White L F, et al. Recent endemic coronavirus infection is associated with less-severe COVID-19. J Clin Invest. 2021; 131(1).
[0424] 92. Agerer B, Koblischke M, Gudipati V, Montano-Gutierrez L F, Smyth M, Popa A, et al. SARS-CoV-2 mutations in MHC-I-restricted epitopes evade CD8(+) T cell responses. Sci Immunol. 2021; 6(57).
[0425] 93. Tarke A, Sidney J, Methot N, Zhang Y, Dan J M, Goodwin B, et al. Negligible impact of SARS-CoV-2 variants on CD4 (+) and CD8 (+) T cell reactivity in COVID-19 exposed donors and vaccinees. bioRxiv. 2021.
[0426] 94. Redd A D, Nardin A, Kared H, Bloch E M, Pekosz A, Laeyendecker 0, et al. CD8+ T cell responses in COVID-19 convalescent individuals target conserved epitopes from multiple prominent SARS-CoV-2 circulating variants. medRxiv. 2021.
[0427] 95. Tegally H, Wilkinson E, Giovanetti M, Iranzadeh A, Fonseca V, Giandhari J, et al. Emergence of a SARS-CoV-2 variant of concern with mutations in spike glycoprotein. Nature. 2021.
[0428] 96. Wang P, Nair M S, Liu L, Iketani S, Luo Y, Guo Y, et al. Antibody Resistance of SARS-CoV-2 Variants B.1.351 and B.1.1.7. Nature. 2021.
[0429] 97. Thomson E C, Rosen L E, Shepherd J G, Spreafico R, da Silva Filipe A, Wojcechowskyj J A, et al. Circulating SARS-CoV-2 spike N439K variants maintain fitness while evading antibody-mediated immunity. Cell. 2021; 184(5):1171-87 e20.
[0430] 98. Avanzato V A, Matson M J, Seifert S N, Pryce R, Williamson B N, Anzick S L, et al. Case Study: Prolonged Infectious SARS-CoV-2 Shedding from an Asymptomatic Immunocompromised Individual with Cancer. Cell. 2020; 183(7):1901-12 e9.
[0431] 99. Rimmelzwaan G F, Berkhoff E G M, Nieuwkoop N J, Smith D J, Fouchier R A M, Osterhaus A. Full restoration of viral fitness by multiple compensatory co-mutations in the nucleoprotein of influenza A virus cytotoxic T-lymphocyte escape mutants. J Gen Virol. 2005; 86(Pt 6):1801-5.
[0432] 100. Bilich T, Nelde A, Heitmann J S, Maringer Y, Roerden M, Bauer J, et al. T cell and antibody kinetics delineate SARS-CoV-2 peptides mediating long-term immune responses in COVID-19 convalescent individuals. Sci Transl Med. 2021.
[0433] 101. Gittelman R M, Lavezzo E, Snyder™, Zahid H J, Elyanow R, Dalai S, et al. Diagnosis and Tracking of SARS-CoV-2 Infection By T-Cell Receptor Sequencing. medRxiv. 2021.
[0434] 102. Shaan Lakshmanappa Y, Elizaldi S R, Roh J W, Schmidt B A, Carroll T D, Weaver K D, et al. SARS-CoV-2 induces robust germinal center CD4 T follicular helper cell responses in rhesus macaques. Nat Commun. 2021; 12(1):541.

### References—Examples 17-18

[0435] Bergwerk, M., Gonen, T., Lustig, Y., Amit, S., Lipsitch, M., Cohen, C., Mandelboim, M., Levin, E. G., Rubin, C., Indenbaum, V., et al. (2021). Covid-19 Breakthrough Infections in Vaccinated Health Care Workers. N Engl J Med 385, 1474-1484.
[0436] Bertoletti, A., Le Bert, N., Qui, M., and Tan, A. T. (2021). SARS-CoV-2-specific T cells in infection and vaccination. Cell Mol Immunol 18, 2307-2312.
[0437] Carrasco Pro, S., Sidney, J., Paul, S., Lindestam Arlehamn, C., Weiskopf, D., Peters, B., and Sette, A. (2015). Automatic Generation of Validated Specific Epitope Sets. J Immunol Res 2015, 763461.
[0438] Cohen, K. W., Linderman, S. L., Moodie, Z., Czartoski, J., Lai, L., Mantus, G., Norwood, C., Nyhoff, L. E., Edara, V. V., Floyd, K., et al. (2021). Longitudinal analysis shows durable and broad immune memory after SARS-CoV-2 infection with persisting antibody responses and memory B and T cells. Cell Rep Med 2, 100354.
[0439] Collier, A. Y., Brown, C. M., McMahan, K., Yu, J., Liu, J., Jacob-Dolan, C., Chandrashekar, A., Tierney, D., Ansel, J. L., Rowe, M., et al. (2021). Immune Responses in Fully Vaccinated Individuals Following Breakthrough Infection with the SARS-CoV-2 Delta Variant in Provincetown, Massachusetts. medRxiv.
[0440] Crotty, S. (2021). Hybrid immunity. Science 372, 1392-1393.
[0441] da Silva Antunes, R., Pallikkuth, S., Williams, E., Dawen Yu, E., Mateus, J., Quiambao, L., Wang, E., Rawlings, S. A., Stadlbauer, D., Jiang, K., et al. (2021). Differential T-Cell Reactivity to Endemic Coronaviruses and SARS-CoV-2 in Community and Health Care Workers. J Infect Dis 224, 70-80.
[0442] Dan, J. M., Mateus, J., Kato, Y., Hastie, K. M., Yu, E. D., Faliti, C. E., Grifoni, A., Ramirez, S. I., Haupt, S., Frazier, A., et al. (2021). Immunological memory to SARS-CoV-2 assessed for up to 8 months after infection. Science 371.
[0443] Feng, S., Phillips, D. J., White, T., Sayal, H., Aley, P. K., Bibi, S., Dold, C., Fuskova, M., Gilbert, S. C., Hirsch, I., et al. (2021). Correlates of protection against symptomatic and asymptomatic SARS-CoV-2 infection. Nat Med.
[0444] Goel, R. R., Painter, M. M., Apostolidis, S. A., Mathew, D., Meng, W., Rosenfeld, A. M., Lundgreen, K. A., Reynaldi, A., Khoury, D. S., Pattekar, A., et al. (2021). mRNA vaccines induce durable immune memory to SARS-CoV-2 and variants of concern. Science, eabm0829.
[0445] Grifoni, A., Sidney, J., Vita, R., Peters, B., Crotty, S., Weiskopf, D., and Sette, A. (2021). SARS-CoV-2 human T cell epitopes: Adaptive immune response against COVID-19. Cell Host Microbe 29, 1076-1092.
[0446] Grifoni, A., Sidney, J., Zhang, Y., Scheuermann, R. H., Peters, B., and Sette, A. (2020a). A Sequence Homology and Bioinformatic Approach Can Predict Candidate Targets for Immune Responses to SARS-CoV-2. Cell Host Microbe 27, 671-680 e672.
[0447] Grifoni, A., Weiskopf, D., Ramirez, S. I., Mateus, J., Dan, J. M., Moderbacher, C. R., Rawlings, S. A., Sutherland, A., Premkumar, L., Jadi, R. S., et al. (2020b). Targets of T Cell Responses to SARS-CoV-2 Coronavirus in Humans with COVID-19 Disease and Unexposed Individuals. Cell 181, 1489-1501 e1415.
[0448] Ibarrondo, F. J., Fulcher, J. A., Goodman-Meza, D., Elliott, J., Hofmann, C., Hausner, M. A., Ferbas, K. G., Tobin, N. H., Aldrovandi, G. M., and Yang, 0.0. (2020). Rapid Decay of Anti-SARS-CoV-2 Antibodies in Persons with Mild Covid-19. N Engl J Med 383, 1085-1087.
[0449] Khoury, D. S., Cromer, D., Reynaldi, A., Schlub, T. E., Wheatley, A. K., Juno, J. A., Subbarao, K., Kent, S. J., Triccas, J. A., and Davenport, M. P. (2021). Neutralizing antibody levels are highly predictive of immune protection from symptomatic SARS-CoV-2 infection. Nat Med 27, 1205-1211.
[0450] Klompas, M. (2021). Understanding Breakthrough Infections Following mRNA SARS-CoV-2 Vaccination. JAMA.
[0451] Knierman, M. D., Lannan, M. B., Spindler, L. J., McMillian, C. L., Konrad, R. J., and Siegel, R. W. (2020). The Human Leukocyte Antigen Class II Immunopeptidome of the SARS-CoV-2 Spike Glycoprotein. Cell Rep 33, 108454.
[0452] Koup, R. A., Donis, R. O., Gilbert, P. B., Li, A. W., Shah, N. A., and Houchens, C. R. (2021). A government-led effort to identify correlates of protection for COVID-19 vaccines. Nat Med 27, 1493-1494.
[0453] Krammer, F. (2021a). A correlate of protection for SARS-CoV-2 vaccines is urgently needed. Nat Med 27, 1147-1148.
[0454] Krammer, F. (2021b). Correlates of protection from SARS-CoV-2 infection. Lancet 397, 1421-1423.
[0455] Krishna, B. A. (Preprint). Retrospective diagnosis of SARS-CoV-2 infection in patients with Long COVID by measuring specific T cell mediated IL-2 release.
[0456] Kruse, M., Dark, C., Aspden, M., Cochrane, D., Competiello, R., Peltz, M., Torres, L., Wrighton-Smith, P., and Dudek, M. (2021). Performance of the T-SPOT®. COVID test for detecting SARS-CoV-2-responsive T cells. Int J Infect Dis.
[0457] Kustin, T., Harel, N., Finkel, U., Perchik, S., Harari, S., Tahor, M., Caspi, I., Levy, R., Leshchinsky, M., Ken Dror, S., et al. (2021). Evidence for increased breakthrough rates of SARS-CoV-2 variants of concern in BNT162b2-mRNA-vaccinated individuals. Nat Med 27, 1379-1384.
[0458] Le Bert, N., Tan, A. T., Kunasegaran, K., Tham, C. Y. L., Hafezi, M., Chia, A., Chng, M. H. Y., Lin, M., Tan, N., Linster, M., et al. (2020). SARS-CoV-2-specific T cell immunity in cases of COVID-19 and SARS, and uninfected controls. Nature 584, 457-462.
[0459] Lind Enoksson, S., Bergman, P., Klingstrom, J., Bostrom, F., Da Silva Rodrigues, R., Winerdal, M. E., and Marits, P. (2021). A flow cytometry-based proliferation assay for clinical evaluation of T-cell memory against SARS-CoV-2. J Immunol Methods 499, 113159.
[0460] Lozano-Ojalvo, D., Camara, C., Lopez-Granados, E., Nozal, P., Del Pino-Molina, L., Bravo-Gallego, L. Y., Paz-Artal, E., Pion, M., Correa-Rocha, R., Ortiz, A., et al. (2021). Differential effects of the second SARS-CoV-2 mRNA vaccine dose on T cell immunity in naive and COVID-19 recovered individuals. Cell Rep, 109570.
[0461] Lucas, C., Vogels, C. B. F., Yildirim, I., Rothman, J. E., Lu, P., Monteiro, V., Gelhausen, J. R., Campbell, M., Silva, J., Tabachikova, A., et al. (2021). Impact of circulating SARS-CoV-2 variants on mRNA vaccine-induced immunity. Nature.
[0462] Martinez-Gallo, M. (2021). Commercialized kits to assess T-cell responses against SARS-CoV-2 S peptides. A pilot study in health care workers. Medicina Clinica.
[0463] Massey, D., Berrent, D., Akrami, A., Assaf, G., Davis, H., Harris, K., McCorkell, L., Ring, A. M., Schulz, W. L., Wei, H., et al. (Preprint-a). Change in Symptoms and Immune Response in People with Post-Acute Sequelae of SARS-Cov-2 Infection (PASC) After SARS-Cov-2 Vaccination.
[0464] Massey, D., Berrent, D., and Krumholz, H. (Preprint-b). Breakthrough Symptomatic COVID-19 Infections Leading to Long Covid: Report from Long Covid Facebook Group Poll.
[0465] Mateus, J., Dan, J. M., Zhang, Z., Rydyznski Moderbacher, C., Lammers, M., Goodwin, B., Sette, A., Crotty, S., and Weiskopf, D. (2021). Low-dose mRNA-1273 COVID-19 vaccine generates durable memory enhanced by cross-reactive T cells. Science 374, eabj9853.
[0466] Mateus, J., Grifoni, A., Tarke, A., Sidney, J., Ramirez, S. I., Dan, J. M., Burger, Z. C., Rawlings, S. A., Smith, D. M., Phillips, E., et al. (2020). Selective and cross-reactive SARS-CoV-2 T cell epitopes in unexposed humans. Science 370, 89-94.
[0467] Mizrahi, B., Lotan, R., Kalkstein, N., Peretz, A., Perez, G., Ben-Tov, A., Chodick, G., Gazit, S., and Patalon, T. (2021). Correlation of SARS-CoV-2-breakthrough infections to time-from-vaccine. Nat Commun 12, 6379.
[0468] Murugesan, K. (Preprint). Long term accuracy of SARS-CoV-2 Interferon-gamma release assays and its apllication in household investigation.
[0469] Murugesan, K., Jagannathan, P., Pham, T. D., Pandey, S., Bonilla, H. F., Jacobson, K., Parsonnet, J., Andrews, J. R., Weiskopf, D., Sette, A., et al. (2020). Interferon-gamma release assay for accurate detection of SARS-CoV-2 T cell response. Clin Infect Dis.
[0470] Niessl, J., Sekine, T., and Buggert, M. (2021). T cell immunity to SARS-CoV-2. Semin Immunol, 101505.
[0471] Ogbe, A., Kronsteiner, B., Skelly, D. T., Pace, M., Brown, A., Adland, E., Adair, K., Akhter, H. D., Ali, M., Ali, S. E., et al. (2021). T cell assays differentiate clinical and subclinical SARS-CoV-2 infections from cross-reactive antiviral responses. Nat Commun 12, 2055.
[0472] Ortega, N., Ribes, M., Vidal, M., Rubio, R., Aguilar, R., Williams, S., Barrios, D., Alonso, S., Hernandez-Luis, P., Mitchell, R. A., et al. (2021). Seven-month kinetics of SARS-CoV-2 antibodies and role of pre-existing antibodies to human coronaviruses. Nat Commun 12, 4740.
[0473] Oseroff, C., Kos, F., Bui, H. H., Peters, B., Pasquetto, V., Glenn, J., Palmore, T., Sidney, J., Tscharke, D. C., Bennink, J. R., et al. (2005). HLA class I-restricted responses to vaccinia recognize a broad array of proteins mainly involved in virulence and viral gene regulation. Proc Natl Acad Sci U S A 102, 13980-13985.
[0474] Painter, M. M., Mathew, D., Goel, R. R., Apostolidis, S. A., Pattekar, A., Kuthuru, O., Baxter, A. E., Herati, R. S., Oldridge, D. A., Gouma, S., et al. (2021). Rapid induction of antigen-specific CD4(+) T cells is associated with coordinated humoral and cellular immunity to SARS-CoV-2 mRNA vaccination. Immunity 54, 2133-2142 e2133.
[0475] Pan, K., Chiu, Y., Huang, E., Chen, M., Wang, J., Lai, I., Singh, S., Shaw, R. M., MacCoss, M. J., and Yee, C. (2021). Mass spectrometric identification of immunogenic SARS-CoV-2 epitopes and cognate TCRs. Proc Natl Acad Sci USA 118.
[0476] Paul, S., Karosiene, E., Dhanda, S. K., Jurtz, V., Edwards, L., Nielsen, M., Sette, A., and Peters, B. (2018). Determination of a Predictive Cleavage Motif for Eluted Major Histocompatibility Complex Class II Ligands. Front Immunol 9, 1795.
[0477] Peeling, R. W., and Olliaro, P. (2021). Rolling out COVID-19 antigen rapid diagnostic tests: the time is now. Lancet Infect Dis 21, 1052-1053.
[0478] Petrone, L., Petruccioli, E., Vanini, V., Cuzzi, G., Najafi Fard, S., Alonzi, T., Castilletti, C., Palmieri, F., Gualano, G., Vittozzi, P., et al. (2021). A whole blood test to measure SARS-CoV-2-specific response in COVID-19 patients. Clin Microbiol Infect 27, 286 e287-286 e213.
[0479] Pouwels, K. B., Pritchard, E., Matthews, P. C., Stoesser, N., Eyre, D. W., Vihta, K. D., House, T., Hay, J., Bell, J. I., Newton, J. N., et al. (2021). Effect of Delta variant on viral burden and vaccine effectiveness against new SARS-CoV-2 infections in the UK. Nat Med.
[0480] Rovida, F., Cassaniti, I., Paolucci, S., Percivalle, E., Sarasini, A., Piralla, A., Giardina, F., Sammartino, J. C., Ferrari, A., Bergami, F., et al. (2021). SARS-CoV-2 vaccine breakthrough infections with the alpha variant are asymptomatic or mildly symptomatic among health care workers. Nat Commun 12, 6032.
[0481] Rydyznski Moderbacher, C., Ramirez, S. I., Dan, J. M., Grifoni, A., Hastie, K. M., Weiskopf, D., Belanger, S., Abbott, R. K., Kim, C., Choi, J., et al. (2020). Antigen-Specific Adaptive Immunity to SARS-CoV-2 in Acute COVID-19 and Associations with Age and Disease Severity. Cell 183, 996-1012 e1019.
[0482] Sekine, T., Perez-Potti, A., Rivera-Ballesteros, O., Stralin, K., Gorin, J. B., Olsson, A., Llewellyn-Lacey, S., Kamal, H., Bogdanovic, G., Muschiol, S., et al. (2020). Robust T Cell Immunity in Convalescent Individuals with Asymptomatic or Mild COVID-19. Cell 183, 158-168 el 14.
[0483] Sette, A., and Crotty, S. (2020). Pre-existing immunity to SARS-CoV-2: the knowns and unknowns. Nat Rev Immunol 20, 457-458.
[0484] Sette, A., and Crotty, S. (2021). Adaptive immunity to SARS-CoV-2 and COVID-19. Cell 184, 861-880.
[0485] Swadling, L., Diniz, M. O., Schmidt, N. M., Amin, O. E., Chandran, A., Shaw, E., Pade, C., Gibbons, J. M., Le Bert, N., Tan, A. T., et al. (2021). Pre-existing polymerase-specific T cells expand in abortive seronegative SARS-CoV-2. Nature.
[0486] Tan, A. T., Lim, J. M., Le Bert, N., Kunasegaran, K., Chia, A., Qui, M. D., Tan, N., Chia, W. N., de Alwis, R., Ying, D., et al. (2021). Rapid measurement of SARS-CoV-2 spike T cells in whole blood from vaccinated and naturally infected individuals. J Clin Invest 131.
[0487] Taquet, M., Dercon, Q., and Harrison, P. J. (Preprint). Six-month sequelae of post-vaccination SARS-CoV-2 infection: a retrospective cohort study of 10,024 breakthrough infections.
[0488] Tarke, A., Sidney, J., Kidd, C. K., Dan, J. M., Ramirez, S. I., Yu, E. D., Mateus, J., da Silva Antunes, R., Moore, E., Rubiro, P., et al. (2021a). Comprehensive analysis of T cell immunodominance and immunoprevalence of SARS-CoV-2 epitopes in COVID-19 cases. Cell Rep Med 2, 100204.
[0489] Tarke, A., Sidney, J., Methot, N., Yu, E. D., Zhang, Y., Dan, J. M., Goodwin, B., Rubiro, P., Sutherland, A., Wang, E., et al. (2021b). Impact of SARS-CoV-2 variants on the total CD4(+) and CD8(+) T cell reactivity in infected or vaccinated individuals. Cell Rep Med 2, 100355.
[0490] Tormo, N. (Pre-proof). Commercial interferpon-gamma release assay to assesss the immune response to first and second doses of mRNA vaccine.
[0491] Trevethan, R. (2017). Sensitivity, Specificity, and Predictive Values: Foundations, Pliabilities, and Pitfalls in Research and Practice. Front Public Health 5, 307.
[0492] Vandenberg, O., Martiny, D., Rochas, O., van Belkum, A., and Kozlakidis, Z. (2021). Considerations for diagnostic COVID-19 tests. Nat Rev Microbiol 19, 171-183.
[0493] Weingarten-Gabbay, S., Klaeger, S., Sarkizova, S., Pearlman, L. R., Chen, D. Y., Gallagher, K. M. E., Bauer, M. R., Taylor, H. B., Dunn, W. A., Tarr, C., et al. (2021). Profiling SARS-CoV-2 HLA-I peptidome reveals T cell epitopes from out-of-frame ORFs. Cell 184, 3962-3980 e3917.
[0494] Zelba, H., Worbs, D., Harter, J., Pieper, N., Kyzirakos-Feger, C., Kayser, S., Seibold, M., Bartsch, O., Kodding, J., and Biskup, S. (2021). A Highly Specific Assay for the Detection of SARS-CoV-2-Reactive CD4(+) and CD8(+) T Cells in COVID-19 Patients. J Immunol 206, 580-587.

The application's sequence listing, which the Patent Office published only in electronic form, follows.

SEQUENCE LISTING (3522 sequences)

SEQ ID NO: 1 - protein, 15 aa, Artificial Sequence
  Synthetic
SEETGTLIVNSVLLF

SEQ ID NO: 2 - protein, 15 aa, Artificial Sequence
  Synthetic
FLLVTLAILTALRLC

SEQ ID NO: 3 - protein, 15 aa, Artificial Sequence
  Synthetic
LAILTALRLCAYCCN

SEQ ID NO: 4 - protein, 15 aa, Artificial Sequence
  Synthetic
FYVYSRVKNLNSSRV

SEQ ID NO: 5 - protein, 15 aa, Artificial Sequence
  Synthetic
EELKKLLEQWNLVIG

SEQ ID NO: 6 - protein, 15 aa, Artificial Sequence
  Synthetic
LLEQWNLVIGFLFLT

SEQ ID NO: 7 - protein, 15 aa, Artificial Sequence
  Synthetic
NLVIGFLFLTWICLL

SEQ ID NO: 8 - protein, 15 aa, Artificial Sequence
  Synthetic
FLFLTWICLLQFAYA

SEQ ID NO: 9 - protein, 15 aa, Artificial Sequence
  Synthetic
WICLLQFAYANRNRF

SEQ ID NO: 10 - protein, 15 aa, Artificial Sequence
  Synthetic
QFAYANRNRFLYIIK

SEQ ID NO: 11 - protein, 15 aa, Artificial Sequence
  Synthetic
NRNRFLYIIKLIFLW

SEQ ID NO: 12 - protein, 15 aa, Artificial Sequence
  Synthetic
LYIIKLIFLWLLWPV

SEQ ID NO: 13 - protein, 15 aa, Artificial Sequence
  Synthetic
LIFLWLLWPVTLACF

SEQ ID NO: 14 - protein, 15 aa, Artificial Sequence
  Synthetic
LLWPVTLACFVLAAV

SEQ ID NO: 15 - protein, 15 aa, Artificial Sequence
  Synthetic
VLAAVYRINWITGGI

SEQ ID NO: 16 - protein, 15 aa, Artificial Sequence
  Synthetic
YRINWITGGIAIAMA

SEQ ID NO: 17 - protein, 15 aa, Artificial Sequence
  Synthetic
ITGGIAIAMACLVGL

SEQ ID NO: 18 - protein, 15 aa, Artificial Sequence
  Synthetic
AIAMACLVGLMWLSY

SEQ ID NO: 19 - protein, 15 aa, Artificial Sequence
  Synthetic
CLVGLMWLSYFIASF

SEQ ID NO: 20 - protein, 15 aa, Artificial Sequence
  Synthetic
MWLSYFIASFRLFAR

SEQ ID NO: 21 - protein, 15 aa, Artificial Sequence
  Synthetic
FIASFRLFARTRSMW

SEQ ID NO: 22 - protein, 15 aa, Artificial Sequence
  Synthetic
RLFARTRSMWSFNPE

SEQ ID NO: 23 - protein, 15 aa, Artificial Sequence
  Synthetic
TRSMWSFNPETNILL

SEQ ID NO: 24 - protein, 15 aa, Artificial Sequence
  Synthetic
SFNPETNILLNVPLH

SEQ ID NO: 25 - protein, 15 aa, Artificial Sequence
  Synthetic
TNILLNVPLHGTILT

SEQ ID NO: 26 - protein, 15 aa, Artificial Sequence
  Synthetic
NVPLHGTILTRPLLE

SEQ ID NO: 27 - protein, 15 aa, Artificial Sequence
  Synthetic
GTILTRPLLESELVI

SEQ ID NO: 28 - protein, 15 aa, Artificial Sequence
  Synthetic
RPLLESELVIGAVIL

SEQ ID NO: 29 - protein, 15 aa, Artificial Sequence
  Synthetic
SELVIGAVILRGHLR

SEQ ID NO: 30 - protein, 18 aa, Artificial Sequence
  Synthetic
GAVILRGHLRIAGHHLGR

SEQ ID NO: 31 - protein, 15 aa, Artificial Sequence
  Synthetic
GAVILRGHLRIAGHH

SEQ ID NO: 32 - protein, 15 aa, Artificial Sequence
  Synthetic
LRGHLRIAGHHLGRC

SEQ ID NO: 33 - protein, 15 aa, Artificial Sequence
  Synthetic
RGHLRIAGHHLGRCD

SEQ ID NO: 34 - protein, 15 aa, Artificial Sequence
  Synthetic
LRIAGHHLGRCDIKD

SEQ ID NO: 35 - protein, 15 aa, Artificial Sequence
  Synthetic
IAGHHLGRCDIKDLP

SEQ ID NO: 36 - protein, 15 aa, Artificial Sequence
  Synthetic
LGRCDIKDLPKEITV

SEQ ID NO: 37 - protein, 15 aa, Artificial Sequence
  Synthetic
IKDLPKEITVATSRT

SEQ ID NO: 38 - protein, 15 aa, Artificial Sequence
  Synthetic
KEITVATSRTLSYYK

SEQ ID NO: 39 - protein, 15 aa, Artificial Sequence
  Synthetic
ATSRTLSYYKLGASQ

SEQ ID NO: 40 - protein, 17 aa, Artificial Sequence
  Synthetic
TSRTLSYYKLGASQRVA

SEQ ID NO: 41 - protein, 15 aa, Artificial Sequence
  Synthetic
SRTLSYYKLGASQRV

SEQ ID NO: 42 - protein, 15 aa, Artificial Sequence
  Synthetic
LSYYKLGASQRVAGD

SEQ ID NO: 43 - protein, 15 aa, Artificial Sequence
  Synthetic
SYYKLGASQRVAGDS

SEQ ID NO: 44 - protein, 15 aa, Artificial Sequence
  Synthetic
LGASQRVAGDSGFAA

SEQ ID NO: 45 - protein, 15 aa, Artificial Sequence
  Synthetic
RVAGDSGFAAYSRYR

SEQ ID NO: 46 - protein, 15 aa, Artificial Sequence
  Synthetic
SGFAAYSRYRIGNYK

SEQ ID NO: 47 - protein, 15 aa, Artificial Sequence
  Synthetic
YSRYRIGNYKLNTDH

SEQ ID NO: 48 - protein, 15 aa, Artificial Sequence
  Synthetic
IGNYKLNTDHSSSSD

SEQ ID NO: 49 - protein, 15 aa, Artificial Sequence
  Synthetic
LNTDHSSSSDNIALL

SEQ ID NO: 50 - protein, 15 aa, Artificial Sequence
  Synthetic
PQNQRNAPRITFGGP

SEQ ID NO: 51 - protein, 15 aa, Artificial Sequence
  Synthetic
NAPRITFGGPSDSTG

SEQ ID NO: 52 - protein, 15 aa, Artificial Sequence
  Synthetic
TFGGPSDSTGSNQNG

SEQ ID NO: 53 - protein, 15 aa, Artificial Sequence
  Synthetic
ASWFTALTQHGKEDL

SEQ ID NO: 54 - protein, 15 aa, Artificial Sequence
  Synthetic
SWFTALTQHGKEDLK

SEQ ID NO: 55 - protein, 15 aa, Artificial Sequence
  Synthetic
LTQHGKEDLKFPRGQ

SEQ ID NO: 56 - protein, 15 aa, Artificial Sequence
  Synthetic
FPRGQGVPINTNSSP

SEQ ID NO: 57 - protein, 15 aa, Artificial Sequence
  Synthetic
GVPINTNSSPDDQIG

SEQ ID NO: 58 - protein, 15 aa, Artificial Sequence
  Synthetic
DDQIGYYRRATRRIR

SEQ ID NO: 59 - protein, 15 aa, Artificial Sequence
  Synthetic
IGYYRRATRRIRGGD

SEQ ID NO: 60 - protein, 15 aa, Artificial Sequence
  Synthetic
YYRRATRRIRGGDGK

SEQ ID NO: 61 - protein, 15 aa, Artificial Sequence
  Synthetic
TRRIRGGDGKMKDLS

SEQ ID NO: 62 - protein, 15 aa, Artificial Sequence
  Synthetic
GGDGKMKDLSPRWYF

SEQ ID NO: 63 - protein, 20 aa, Artificial Sequence
  Synthetic
MKDLSPRWYFYYLGTGPEAG

SEQ ID NO: 64 - protein, 15 aa, Artificial Sequence
  Synthetic
MKDLSPRWYFYYLGT

SEQ ID NO: 65 - protein, 15 aa, Artificial Sequence
  Synthetic
PRWYFYYLGTGPEAG

SEQ ID NO: 66 - protein, 15 aa, Artificial Sequence
  Synthetic
RWYFYYLGTGPEAGL

SEQ ID NO: 67 - protein, 15 aa, Artificial Sequence
  Synthetic
LPYGANKDGIIWVAT

SEQ ID NO: 68 - protein, 15 aa, Artificial Sequence
  Synthetic
NKDGIIWVATEGALN

SEQ ID NO: 69 - protein, 15 aa, Artificial Sequence
  Synthetic
KDGIIWVATEGALNT

SEQ ID NO: 70 - protein, 15 aa, Artificial Sequence
  Synthetic
IWVATEGALNTPKDH

SEQ ID NO: 71 - protein, 15 aa, Artificial Sequence
  Synthetic
EGALNTPKDHIGTRN

SEQ ID NO: 72 - protein, 15 aa, Artificial Sequence
  Synthetic
AIVLQLPQGTTLPKG

SEQ ID NO: 73 - protein, 15 aa, Artificial Sequence
  Synthetic
AGNGGDAALALLLLD

SEQ ID NO: 74 - protein, 15 aa, Artificial Sequence
  Synthetic
DAALALLLLDRLNQL

SEQ ID NO: 75 - protein, 15 aa, Artificial Sequence
  Synthetic
LLLLDRLNQLESKMS

SEQ ID NO: 76 - protein, 15 aa, Artificial Sequence
  Synthetic
GKGQQQQGQTVTKKS

SEQ ID NO: 77 - protein, 15 aa, Artificial Sequence
  Synthetic
AAEASKKPRQKRTAT

SEQ ID NO: 78 - protein, 15 aa, Artificial Sequence
  Synthetic
KKPRQKRTATKAYNV

SEQ ID NO: 79 - protein, 15 aa, Artificial Sequence
  Synthetic
KPRQKRTATKAYNVT

SEQ ID NO: 80 - protein, 15 aa, Artificial Sequence
  Synthetic
KRTATKAYNVTQAFG

SEQ ID NO: 81 - protein, 15 aa, Artificial Sequence
  Synthetic
KAYNVTQAFGRRGPE

SEQ ID NO: 82 - protein, 15 aa, Artificial Sequence
  Synthetic
TQAFGRRGPEQTQGN

SEQ ID NO: 83 - protein, 15 aa, Artificial Sequence
  Synthetic
RRGPEQTQGNFGDQE

SEQ ID NO: 84 - protein, 15 aa, Artificial Sequence
  Synthetic
FGDQELIRQGTDYKH

SEQ ID NO: 85 - protein, 15 aa, Artificial Sequence
  Synthetic
LIRQGTDYKHWPQIA

SEQ ID NO: 86 - protein, 15 aa, Artificial Sequence
  Synthetic
TDYKHWPQIAQFAPS

SEQ ID NO: 87 - protein, 15 aa, Artificial Sequence
  Synthetic
YKHWPQIAQFAPSAS

SEQ ID NO: 88 - protein, 15 aa, Artificial Sequence
  Synthetic
WPQIAQFAPSASAFF

SEQ ID NO: 89 - protein, 15 aa, Artificial Sequence
  Synthetic
QFAPSASAFFGMSRI

SEQ ID NO: 90 - protein, 15 aa, Artificial Sequence
  Synthetic
ASAFFGMSRIGMEVT

SEQ ID NO: 91 - protein, 15 aa, Artificial Sequence
  Synthetic
AFFGMSRIGMEVTPS

SEQ ID NO: 92 - protein, 20 aa, Artificial Sequence
  Synthetic
GMEVTPSGTWLTYTGAIKLD

SEQ ID NO: 93 - protein, 15 aa, Artificial Sequence
  Synthetic
GMEVTPSGTWLTYTG

SEQ ID NO: 94 - protein, 15 aa, Artificial Sequence
  Synthetic
PSGTWLTYTGAIKLD

SEQ ID NO: 95 - protein, 15 aa, Artificial Sequence
  Synthetic
GTWLTYTGAIKLDDK

SEQ ID NO: 96 - protein, 18 aa, Artificial Sequence
  Synthetic
TWLTYTGAIKLDDKDPNF

SEQ ID NO: 97 - protein, 15 aa, Artificial Sequence
  Synthetic
LTYTGAIKLDDKDPN

SEQ ID NO: 98 - protein, 15 aa, Artificial Sequence
  Synthetic
AIKLDDKDPNFKDQV

SEQ ID NO: 99 - protein, 18 aa, Artificial Sequence
  Synthetic
PNFKDQVILLNKHIDAYK

SEQ ID NO: 100 - protein, 15 aa, Artificial Sequence
  Synthetic
FKDQVILLNKHIDAY

SEQ ID NO: 101 - protein, 15 aa, Artificial Sequence
  Synthetic
ILLNKHIDAYKTFPP

SEQ ID NO: 102 - protein, 15 aa, Artificial Sequence
  Synthetic
HIDAYKTFPPTEPKK

SEQ ID NO: 103 - protein, 15 aa, Artificial Sequence
  Synthetic
QKKQQTVTLLPAADL

SEQ ID NO: 104 - protein, 16 aa, Artificial Sequence
  Synthetic
KQQTVTLLPAADLDDF

SEQ ID NO: 105 - protein, 15 aa, Artificial Sequence
  Synthetic
TVTLLPAADLDDFSK

SEQ ID NO: 106 - protein, 15 aa, Artificial Sequence
  Synthetic
AADLDDFSKQLQQSM

SEQ ID NO: 107 - protein, 15 aa, Artificial Sequence
  Synthetic
PLNSIIKTIQPRVEK

SEQ ID NO: 108 - protein, 15 aa, Artificial Sequence
  Synthetic
EEIAIILASFSASTS

SEQ ID NO: 109 - protein, 15 aa, Artificial Sequence
  Synthetic
SPLYAFASEAARVVR

SEQ ID NO: 110 - protein, 15 aa, Artificial Sequence
  Synthetic
AITILDGISQYSLRL

SEQ ID NO: 111 - protein, 15 aa, Artificial Sequence
  Synthetic
QTFFKLVNKFLALCA

SEQ ID NO: 112 - protein, 15 aa, Artificial Sequence
  Synthetic
GETFVTHSKGLYRKC

SEQ ID NO: 113 - protein, 15 aa, Artificial Sequence
  Synthetic
ADAVIKTLQPVSELL

SEQ ID NO: 114 - protein, 15 aa, Artificial Sequence
  Synthetic
ESDDYIATNGPLKVG

SEQ ID NO: 115 - protein, 15 aa, Artificial Sequence
  Synthetic
IATNGPLKVGGSCVL

SEQ ID NO: 116 - protein, 15 aa, Artificial Sequence
  Synthetic
SGHNLAKHCLHVVGP

SEQ ID NO: 117 - protein, 15 aa, Artificial Sequence
  Synthetic
NLYDKLVSSFLEMKS

SEQ ID NO: 118 - protein, 15 aa, Artificial Sequence
  Synthetic
ENLLLYIDINGNLHP

SEQ ID NO: 119 - protein, 15 aa, Artificial Sequence
  Synthetic
KSAFYILPSIISNEK

SEQ ID NO: 120 - protein, 15 aa, Artificial Sequence
  Synthetic
RFYFYTSKTTVASLI

SEQ ID NO: 121 - protein, 15 aa, Artificial Sequence
  Synthetic
EAARYMRSLKVPATV

SEQ ID NO: 122 - protein, 15 aa, Artificial Sequence
  Synthetic
LPNDDTLRVEAFEYY

SEQ ID NO: 123 - protein, 15 aa, Artificial Sequence
  Synthetic
TLRVEAFEYYHTTDP

SEQ ID NO: 124 - protein, 15 aa, Artificial Sequence
  Synthetic
HTTDPSFLGRYMSAL

SEQ ID NO: 125 - protein, 15 aa, Artificial Sequence
  Synthetic
SFLGRYMSALNHTKK

SEQ ID NO: 126 - protein, 15 aa, Artificial Sequence
  Synthetic
YMSALNHTKKWKYPQ

SEQ ID NO: 127 - protein, 15 aa, Artificial Sequence
  Synthetic
NHTKKWKYPQVNGLT

SEQ ID NO: 128 - protein, 15 aa, Artificial Sequence
  Synthetic
ESPFVMMSAPPAQYE

SEQ ID NO: 129 - protein, 15 aa, Artificial Sequence
  Synthetic
YCIDGALLTKSSEYK

SEQ ID NO: 130 - protein, 15 aa, Artificial Sequence
  Synthetic
DNFKFVCDNIKFADD

SEQ ID NO: 131 - protein, 15 aa, Artificial Sequence
  Synthetic
LNQLTGYKKPASREL

SEQ ID NO: 132 - protein, 15 aa, Artificial Sequence
  Synthetic
GYKKPASRELKVTFF

SEQ ID NO: 133 - protein, 15 aa, Artificial Sequence
  Synthetic
ASRELKVTFFPDLNG

SEQ ID NO: 134 - protein, 15 aa, Artificial Sequence
  Synthetic
KVTFFPDLNGDVVAI

SEQ ID NO: 135 - protein, 15 aa, Artificial Sequence
  Synthetic
PDLNGDVVAIDYKHY

SEQ ID NO: 136 - protein, 15 aa, Artificial Sequence
  Synthetic
TPSFKKGAKLLHKPI

SEQ ID NO: 137 - protein, 15 aa, Artificial Sequence
  Synthetic
VWHVNNATNKATYKP

SEQ ID NO: 138 - protein, 15 aa, Artificial Sequence
  Synthetic
MAAYVDNSSLTIKKP

SEQ ID NO: 139 - protein, 15 aa, Artificial Sequence
  Synthetic
NELSRVLGLKTLATH

SEQ ID NO: 140 - protein, 15 aa, Artificial Sequence
  Synthetic
TFTRSTNSRIKASMP

SEQ ID NO: 141 - protein, 15 aa, Artificial Sequence
  Synthetic
TNSRIKASMPTTIAK

SEQ ID NO: 142 - protein, 15 aa, Artificial Sequence
  Synthetic
NTVKSVGKFCLEASF

SEQ ID NO: 143 - protein, 15 aa, Artificial Sequence
  Synthetic
LEASFNYLKSPNFSK

SEQ ID NO: 144 - protein, 15 aa, Artificial Sequence
  Synthetic
PNFSKLINIIIWFLL

SEQ ID NO: 145 - protein, 15 aa, Artificial Sequence
  Synthetic
GSLIYSTAALGVLMS

SEQ ID NO: 146 - protein, 15 aa, Artificial Sequence
  Synthetic
ISSFKWDLTAFGLVA

SEQ ID NO: 147 - protein, 15 aa, Artificial Sequence
  Synthetic
WDLTAFGLVAEWFLA

SEQ ID NO: 148 - protein, 15 aa, Artificial Sequence
  Synthetic
FGLVAEWFLAYILFT

SEQ ID NO: 149 - protein, 15 aa, Artificial Sequence
  Synthetic
FDAYVNTFSSTFNVP

SEQ ID NO: 150 - protein, 15 aa, Artificial Sequence
  Synthetic
SHNIALIWNVKDFMS

SEQ ID NO: 151 - protein, 15 aa, Artificial Sequence
  Synthetic
KGGKIVNNWLKQLIK

SEQ ID NO: 152 - protein, 15 aa, Artificial Sequence
  Synthetic
LFVAAIFYLITPVHV

SEQ ID NO: 153 - protein, 15 aa, Artificial Sequence
  Synthetic
AVITREVGFVVPGLP

SEQ ID NO: 154 - protein, 15 aa, Artificial Sequence
  Synthetic
VPGLPGTILRTTNGD

SEQ ID NO: 155 - protein, 15 aa, Artificial Sequence
  Synthetic
FLHFLPRVFSAVGNI

SEQ ID NO: 156 - protein, 15 aa, Artificial Sequence
  Synthetic
DTRYVLMDGSIIQFP

SEQ ID NO: 157 - protein, 15 aa, Artificial Sequence
  Synthetic
SIVAGGIVAIVVTCL

SEQ ID NO: 158 - protein, 15 aa, Artificial Sequence
  Synthetic
FGEYSHVVAFNTLLF

SEQ ID NO: 159 - protein, 15 aa, Artificial Sequence
  Synthetic
NTLLFLMSFTVLCLT

SEQ ID NO: 160 - protein, 15 aa, Artificial Sequence
  Synthetic
PVYSFLPGVYSVIYL

SEQ ID NO: 161 - protein, 15 aa, Artificial Sequence
  Synthetic
YLTFYLTNDVSFLAH

SEQ ID NO: 162 - protein, 15 aa, Artificial Sequence
  Synthetic
SFLAHIQWMVMFTPL

SEQ ID NO: 163 - protein, 15 aa, Artificial Sequence
  Synthetic
IQWMVMFTPLVPFWI

SEQ ID NO: 164 - protein, 15 aa, Artificial Sequence
  Synthetic
MFTPLVPFWITIAYI

SEQ ID NO: 165 - protein, 15 aa, Artificial Sequence
  Synthetic
TIAYIICISTKHFYW

SEQ ID NO: 166 - protein, 15 aa, Artificial Sequence
  Synthetic
KHFYWFFSNYLKRRV

SEQ ID NO: 167 - protein, 15 aa, Artificial Sequence
  Synthetic
CTFLLNKEMYLKLRS

SEQ ID NO: 168 - protein, 15 aa, Artificial Sequence
  Synthetic
LTQYNRYLALYNKYK

SEQ ID NO: 169 - protein, 15 aa, Artificial Sequence
  Synthetic
RYLALYNKYKYFSGA

SEQ ID NO: 170 - protein, 15 aa, Artificial Sequence
  Synthetic
YREAACCHLAKALND

SEQ ID NO: 171 - protein, 15 aa, Artificial Sequence
  Synthetic
CCHLAKALNDFSNSG

SEQ ID NO: 172 - protein, 15 aa, Artificial Sequence
  Synthetic
FSNSGSDVLYQPPQT

SEQ ID NO: 173 - protein, 15 aa, Artificial Sequence
  Synthetic
SDVLYQPPQTSITSA

SEQ ID NO: 174 - protein, 15 aa, Artificial Sequence
  Synthetic
NHNFLVQAGNVQLRV

SEQ ID NO: 175 - protein, 15 aa, Artificial Sequence
  Synthetic
QNCVLKLKVDTANPK

SEQ ID NO: 176 - protein, 15 aa, Artificial Sequence
  Synthetic
LLVLVQSTQWSLFFF

SEQ ID NO: 177 - protein, 15 aa, Artificial Sequence
  Synthetic
SLFFFLYENAFLPFA

SEQ ID NO: 178 - protein, 15 aa, Artificial Sequence
  Synthetic
LCLFLLPSLATVAYF

SEQ ID NO: 179 - protein, 15 aa, Artificial Sequence
  Synthetic
TLVYKVYYGNALDQA

SEQ ID NO: 180 - protein, 15 aa, Artificial Sequence
  Synthetic
NRYFRLTLGVYDYLV

SEQ ID NO: 181 - protein, 15 aa, Artificial Sequence
  Synthetic
DAFKLNIKLLGVGGK

SEQ ID NO: 182 - protein, 15 aa, Artificial Sequence
  Synthetic
RVESSSKLWAQCVQL

SEQ ID NO: 183 - protein, 15 aa, Artificial Sequence
  Synthetic
SKLWAQCVQLHNDIL

SEQ ID NO: 184 - protein, 15 aa, Artificial Sequence
  Synthetic
VLKKLKKSLNVAKSE

SEQ ID NO: 185 - protein, 15 aa, Artificial Sequence
  Synthetic
LIVTALRANSAVKLQ

SEQ ID NO: 186 - protein, 15 aa, Artificial Sequence
  Synthetic
VLSFCAFAVDAAKAY

SEQ ID NO: 187 - protein, 15 aa, Artificial Sequence
  Synthetic
PDILRVYANLGERVR

SEQ ID NO: 188 - protein, 15 aa, Artificial Sequence
  Synthetic
SLLMPILTLTRALTA

SEQ ID NO: 189 - protein, 15 aa, Artificial Sequence
  Synthetic
HCANFNVLFSTVFPP

SEQ ID NO: 190 - protein, 15 aa, Artificial Sequence
  Synthetic
NVLFSTVFPPTSFGP

SEQ ID NO: 191 - protein, 15 aa, Artificial Sequence
  Synthetic
QDALFAYTKRNVIPT

SEQ ID NO: 192 - protein, 15 aa, Artificial Sequence
  Synthetic
KLLKSIAATRGATVV

SEQ ID NO: 193 - protein, 15 aa, Artificial Sequence
  Synthetic
IAATRGATVVIGTSK

SEQ ID NO: 194 - protein, 15 aa, Artificial Sequence
  Synthetic
YPKCDRAMPNMLRIM

SEQ ID NO: 195 - protein, 15 aa, Artificial Sequence
  Synthetic
RAMPNMLRIMASLVL

SEQ ID NO: 196 - protein, 15 aa, Artificial Sequence
  Synthetic
SHRFYRLANECAQVL

SEQ ID NO: 197 - protein, 15 aa, Artificial Sequence
  Synthetic
SEMVMCGGSLYVKPG

SEQ ID NO: 198 - protein, 15 aa, Artificial Sequence
  Synthetic
FNICQAVTANVNALL

SEQ ID NO: 199 - protein, 15 aa, Artificial Sequence
  Synthetic
AVTANVNALLSTDGN

SEQ ID NO: 200 - protein, 15 aa, Artificial Sequence
  Synthetic
EFYAYLRKHFSMMIL

SEQ ID NO: 201 - protein, 15 aa, Artificial Sequence
  Synthetic
LRKHFSMMILSDDAV

SEQ ID NO: 202 - protein, 15 aa, Artificial Sequence
  Synthetic
GLVASIKNFKSVLYY

SEQ ID NO: 203 - protein, 15 aa, Artificial Sequence
  Synthetic
KTDGTLMIERFVSLA

SEQ ID NO: 204 - protein, 15 aa, Artificial Sequence
  Synthetic
LMIERFVSLAIDAYP

SEQ ID NO: 205 - protein, 15 aa, Artificial Sequence
  Synthetic
FVSLAIDAYPLTKHP

SEQ ID NO: 206 - protein, 15 aa, Artificial Sequence
  Synthetic
IDAYPLTKHPNQEYA

SEQ ID NO: 207 - protein, 15 aa, Artificial Sequence
  Synthetic
DVFHLYLQYIRKLHD

SEQ ID NO: 208 - protein, 15 aa, Artificial Sequence
  Synthetic
TSHKLVLSVNPYVCN

SEQ ID NO: 209 - protein, 15 aa, Artificial Sequence
  Synthetic
ELHLSWEVGKPRPPL

SEQ ID NO: 210 - protein, 15 aa, Artificial Sequence
  Synthetic
PRPPLNRNYVFTGYR

SEQ ID NO: 211 - protein, 15 aa, Artificial Sequence
  Synthetic
FTGYRVTKNSKVQIG

SEQ ID NO: 212 - protein, 15 aa, Artificial Sequence
  Synthetic
VTKNSKVQIGEYTFE

SEQ ID NO: 213 - protein, 15 aa, Artificial Sequence
  Synthetic
VNARLRAKHYVYIGD

SEQ ID NO: 214 - protein, 15 aa, Artificial Sequence
  Synthetic
ISPYNSQNAVASKIL

SEQ ID NO: 215 - protein, 15 aa, Artificial Sequence
  Synthetic
NVNRFNVAITRAKVG

SEQ ID NO: 216 - protein, 15 aa, Artificial Sequence
  Synthetic
NMFITREEAIRHVRA

SEQ ID NO: 217 - protein, 15 aa, Artificial Sequence
  Synthetic
REEAIRHVRAWIGFD

SEQ ID NO: 218 - protein, 15 aa, Artificial Sequence
  Synthetic
PLMYKGLPWNVVRIK

SEQ ID NO: 219 - protein, 15 aa, Artificial Sequence
  Synthetic
LDDFVEIIKSQDLSV

SEQ ID NO: 220 - protein, 15 aa, Artificial Sequence
  Synthetic
EIIKSQDLSVVSKVV

SEQ ID NO: 221 - protein, 15 aa, Artificial Sequence
  Synthetic
TQLCQYLNTLTLAVP

SEQ ID NO: 222 - protein, 15 aa, Artificial Sequence
  Synthetic
AVMSLKEGQINDMIL

SEQ ID NO: 223 - protein, 15 aa, Artificial Sequence
  Synthetic
KEGQINDMILSLLSK

SEQ ID NO: 224 - protein, 15 aa, Artificial Sequence
  Synthetic
RENNRVVISSDVLVN

SEQ ID NO: 225 - protein, 15 aa, Artificial Sequence
  Synthetic
FMRIFTIGTVTLKQG

SEQ ID NO: 226 - protein, 15 aa, Artificial Sequence
  Synthetic
SDFVRATATIPIQAS

SEQ ID NO: 227 - protein, 15 aa, Artificial Sequence
  Synthetic
ALLAVFQSASKIITL

SEQ ID NO: 228 - protein, 15 aa, Artificial Sequence
  Synthetic
KIITLKKRWQLALSK

SEQ ID NO: 229 - protein, 15 aa, Artificial Sequence
  Synthetic
KKRWQLALSKGVHFV

SEQ ID NO: 230 - protein, 15 aa, Artificial Sequence
  Synthetic
CNLLLLFVTVYSHLL

SEQ ID NO: 231 - protein, 15 aa, Artificial Sequence
  Synthetic
LVAAGLEAPFLYLYA

SEQ ID NO: 232 - protein, 15 aa, Artificial Sequence
  Synthetic
LEAPFLYLYALVYFL

SEQ ID NO: 233 - protein, 15 aa, Artificial Sequence
  Synthetic
LYLYALVYFLQSINF

SEQ ID NO: 234 - protein, 15 aa, Artificial Sequence
  Synthetic
LVYFLQSINFVRIIM

SEQ ID NO: 235 - protein, 15 aa, Artificial Sequence
  Synthetic
QSINFVRIIMRLWLC

SEQ ID NO: 236 - protein, 15 aa, Artificial Sequence
  Synthetic
VRIIMRLWLCWKCRS

SEQ ID NO: 237 - protein, 15 aa, Artificial Sequence
  Synthetic
RLWLCWKCRSKNPLL

SEQ ID NO: 238 - protein, 15 aa, Artificial Sequence
  Synthetic
KNPLLYDANYFLCWH

SEQ ID NO: 239 - protein, 15 aa, Artificial Sequence
  Synthetic
YDANYFLCWHTNCYD

SEQ ID NO: 240 - protein, 15 aa, Artificial Sequence
  Synthetic
FLCWHTNCYDYCIPY

SEQ ID NO: 241 - protein, 15 aa, Artificial Sequence
  Synthetic
TNCYDYCIPYNSVTS

SEQ ID NO: 242 - protein, 15 aa, Artificial Sequence
  Synthetic
YFTSDYYQLYSTQLS

SEQ ID NO: 243 - protein, 15 aa, Artificial Sequence
  Synthetic
TDTGVEHVTFFIYNK

SEQ ID NO: 244 - protein, 15 aa, Artificial Sequence
  Synthetic
EHVTFFIYNKIVDEP

SEQ ID NO: 245 - protein, 15 aa, Artificial Sequence
  Synthetic
FIYNKIVDEPEEHVQ

SEQ ID NO: 246 - protein, 15 aa, Artificial Sequence
  Synthetic
GSSGVVNPVMEPIYD

SEQ ID NO: 247 - protein, 15 aa, Artificial Sequence
  Synthetic
MFHLVDFQVTIAEIL

SEQ ID NO: 248 - protein, 15 aa, Artificial Sequence
  Synthetic
IAEILLIIMRTFKVS

SEQ ID NO: 249 - protein, 15 aa, Artificial Sequence
  Synthetic
AEILLIIMRTFKVSI

SEQ ID NO: 250 - protein, 15 aa, Artificial Sequence
  Synthetic
LIIMRTFKVSIWNLD

SEQ ID NO: 251 - protein, 15 aa, Artificial Sequence
  Synthetic
TFKVSIWNLDYIINL

SEQ ID NO: 252 - protein, 15 aa, Artificial Sequence
  Synthetic
IWNLDYIINLIIKNL

SEQ ID NO: 253 - protein, 15 aa, Artificial Sequence
  Synthetic
YIINLIIKNLSKSLT

SEQ ID NO: 254 - protein, 15 aa, Artificial Sequence
  Synthetic
MKIILFLALITLATC

SEQ ID NO: 255 - protein, 15 aa, Artificial Sequence
  Synthetic
IILFLALITLATCEL

SEQ ID NO: 256 - protein, 18 aa, Artificial Sequence
  Synthetic
DGVKHVYQLRARSVSPKL

SEQ ID NO: 257 - protein, 15 aa, Artificial Sequence
  Synthetic
VKHVYQLRARSVSPK

SEQ ID NO: 258 - protein, 15 aa, Artificial Sequence
  Synthetic
QEEVQELYSPIFLIV

SEQ ID NO: 259 - protein, 15 aa, Artificial Sequence
  Synthetic
LYSPIFLIVAAIVFI

SEQ ID NO: 260 - protein, 15 aa, Artificial Sequence
  Synthetic
SPIFLIVAAIVFITL

SEQ ID NO: 261 - protein, 15 aa, Artificial Sequence
  Synthetic
DFYLCFLAFLLFLVL

SEQ ID NO: 262 - protein, 15 aa, Artificial Sequence
  Synthetic
MKFLVFLGIITTVAA

SEQ ID NO: 263 - protein, 15 aa, Artificial Sequence
  Synthetic
FLGIITTVAAFHQEC

SEQ ID NO: 264 - protein, 15 aa, Artificial Sequence
  Synthetic
TTVAAFHQECSLQSC

SEQ ID NO: 265 - protein, 15 aa, Artificial Sequence
  Synthetic
FHQECSLQSCTQHQP

SEQ ID NO: 266 - protein, 15 aa, Artificial Sequence
  Synthetic
SLQSCTQHQPYVVDD

SEQ ID NO: 267 - protein, 15 aa, Artificial Sequence
  Synthetic
TQHQPYVVDDPCPIH

SEQ ID NO: 268 - protein, 15 aa, Artificial Sequence
  Synthetic
YVVDDPCPIHFYSKW

SEQ ID NO: 269 - protein, 15 aa, Artificial Sequence
  Synthetic
PCPIHFYSKWYIRVG

SEQ ID NO: 270 - protein, 15 aa, Artificial Sequence
  Synthetic
FYSKWYIRVGARKSA

SEQ ID NO: 271 - protein, 15 aa, Artificial Sequence
  Synthetic
SKWYIRVGARKSAPL

SEQ ID NO: 272 - protein, 15 aa, Artificial Sequence
  Synthetic
YIRVGARKSAPLIEL

SEQ ID NO: 273 - protein, 15 aa, Artificial Sequence
  Synthetic
ARKSAPLIELCVDEA

SEQ ID NO: 274 - protein, 15 aa, Artificial Sequence
  Synthetic
PLIELCVDEAGSKSP

SEQ ID NO: 275 - protein, 15 aa, Artificial Sequence
  Synthetic
CVDEAGSKSPIQYID

SEQ ID NO: 276 - protein, 15 aa, Artificial Sequence
  Synthetic
IQYIDIGNYTVSCLP

SEQ ID NO: 277 - protein, 15 aa, Artificial Sequence
  Synthetic
IGNYTVSCLPFTINC

SEQ ID NO: 278 - protein, 15 aa, Artificial Sequence
  Synthetic
FTINCQEPKLGSLVV

SEQ ID NO: 279 - protein, 15 aa, Artificial Sequence
  Synthetic
QEPKLGSLVVRCSFY

SEQ ID NO: 280 - protein, 15 aa, Artificial Sequence
  Synthetic
GSLVVRCSFYEDFLE

SEQ ID NO: 281 - protein, 15 aa, Artificial Sequence
  Synthetic
RCSFYEDFLEYHDVR

SEQ ID NO: 282 - protein, 15 aa, Artificial Sequence
  Synthetic
EDFLEYHDVRVVLDF

SEQ ID NO: 283 - protein, 15 aa, Artificial Sequence
  Synthetic
DFLEYHDVRVVLDFI

SEQ ID NO: 284 - protein, 15 aa, Artificial Sequence
  Synthetic
INVFAFPFTIYSLLL

SEQ ID NO: 285 - protein, 13 aa, Artificial Sequence
  Synthetic
MFVFLVLLPLVSS

SEQ ID NO: 286 - protein, 15 aa, Artificial Sequence
  Synthetic
VLLPLVSSQCVNLTT

SEQ ID NO: 287 - protein, 15 aa, Artificial Sequence
  Synthetic
VSSQCVNLTTRTQLP

SEQ ID NO: 288 - protein, 15 aa, Artificial Sequence
  Synthetic
VNLTTRTQLPPAYTN

SEQ ID NO: 289 - protein, 15 aa, Artificial Sequence
  Synthetic
SFTRGVYYPDKVFRS

SEQ ID NO: 290 - protein, 15 aa, Artificial Sequence
  Synthetic
VYYPDKVFRSSVLHS

SEQ ID NO: 291 - protein, 15 aa, Artificial Sequence
  Synthetic
SVLHSTQDLFLPFFS

SEQ ID NO: 292 - protein, 15 aa, Artificial Sequence
  Synthetic
LPFFSNVTWFHAIHV

SEQ ID NO: 293 - protein, 15 aa, Artificial Sequence
  Synthetic
PFFSNVTWFHAIHVS

SEQ ID NO: 294 - protein, 15 aa, Artificial Sequence
  Synthetic
NVTWFHAIHVSGTNG

SEQ ID NO: 295 - protein, 15 aa, Artificial Sequence
  Synthetic
NPVLPFNDGVYFAST

SEQ ID NO: 296 - protein, 15 aa, Artificial Sequence
  Synthetic
EKSNIIRGWIFGTTL

SEQ ID NO: 297 - protein, 15 aa, Artificial Sequence
  Synthetic
IRGWIFGTTLDSKTQ

SEQ ID NO: 298 - protein, 15 aa, Artificial Sequence
  Synthetic
FGTTLDSKTQSLLIV

SEQ ID NO: 299 - protein, 15 aa, Artificial Sequence
  Synthetic
DSKTQSLLIVNNATN

SEQ ID NO: 300 - protein, 15 aa, Artificial Sequence
  Synthetic
SLLIVNNATNVVIKV

SEQ ID NO: 301 - protein, 15 aa, Artificial Sequence
  Synthetic
NNATNVVIKVCEFQF

SEQ ID NO: 302 - protein, 15 aa, Artificial Sequence
  Synthetic
VVIKVCEFQFCNDPF

SEQ ID NO: 303 - protein, 15 aa, Artificial Sequence
  Synthetic
CEFQFCNDPFLGVYY

SEQ ID NO: 304 - protein, 15 aa, Artificial Sequence
  Synthetic
LGVYYHKNNKSWMES

SEQ ID NO: 305 - protein, 15 aa, Artificial Sequence
  Synthetic
HKNNKSWMESEFRVY

SEQ ID NO: 306 - protein, 15 aa, Artificial Sequence
  Synthetic
SSANNCTFEYVSQPF

SEQ ID NO: 307 - protein, 15 aa, Artificial Sequence
  Synthetic
CTFEYVSQPFLMDLE

SEQ ID NO: 308 - protein, 15 aa, Artificial Sequence
  Synthetic
VSQPFLMDLEGKQGN

SEQ ID NO: 309 - protein, 15 aa, Artificial Sequence
  Synthetic
LMDLEGKQGNFKNLR

SEQ ID NO: 310 - protein, 15 aa, Artificial Sequence
  Synthetic
GKQGNFKNLREFVFK

SEQ ID NO: 311 - protein, 15 aa, Artificial Sequence
  Synthetic
EFVFKNIDGYFKIYS

SEQ ID NO: 312 - protein, 15 aa, Artificial Sequence
  Synthetic
NIDGYFKIYSKHTPI

SEQ ID NO: 313 - protein, 15 aa, Artificial Sequence
  Synthetic
FKIYSKHTPINLVRD

SEQ ID NO: 314 - protein, 15 aa, Artificial Sequence
  Synthetic
SKHTPINLVRDLPQG

SEQ ID NO: 315 - protein, 15 aa, Artificial Sequence
  Synthetic
KHTPINLVRDLPQGF

SEQ ID NO: 316 - protein, 15 aa, Artificial Sequence
  Synthetic
PINLVRDLPQGFSAL

SEQ ID NO: 317 - protein, 15 aa, Artificial Sequence
  Synthetic
NLVRDLPQGFSALEP

SEQ ID NO: 318 - protein, 15 aa, Artificial Sequence
  Synthetic
LPQGFSALEPLVDLP

SEQ ID NO: 319 - protein, 15 aa, Artificial Sequence
  Synthetic
SALEPLVDLPIGINI

SEQ ID NO: 320 - protein, 15 aa, Artificial Sequence
  Synthetic
IGINITRFQTLLALH

SEQ ID NO: 321 - protein, 15 aa, Artificial Sequence
  Synthetic
ITRFQTLLALHRSYL

SEQ ID NO: 322 - protein, 15 aa, Artificial Sequence
  Synthetic
TRFQTLLALHRSYLT

SEQ ID NO: 323 - protein, 15 aa, Artificial Sequence
  Synthetic
LLALHRSYLTPGDSS

SEQ ID NO: 324 - protein, 15 aa, Artificial Sequence
  Synthetic
YVGYLQPRTFLLKYN

SEQ ID NO: 325 - protein, 15 aa, Artificial Sequence
  Synthetic
CTLKSFTVEKGIYQT

SEQ ID NO: 326 - protein, 15 aa, Artificial Sequence
  Synthetic
FTVEKGIYQTSNFRV

SEQ ID NO: 327 - protein, 15 aa, Artificial Sequence
  Synthetic
GIYQTSNFRVQPTES

SEQ ID NO: 328 - protein, 15 aa, Artificial Sequence
  Synthetic
SNFRVQPTESIVRFP

SEQ ID NO: 329 - protein, 15 aa, Artificial Sequence
  Synthetic
QPTESIVRFPNITNL

SEQ ID NO: 330 - protein, 15 aa, Artificial Sequence
  Synthetic
IVRFPNITNLCPFGE

SEQ ID NO: 331 - protein, 15 aa, Artificial Sequence
  Synthetic
CPFGEVFNATRFASV

SEQ ID NO: 332 - protein, 15 aa, Artificial Sequence
  Synthetic
VFNATRFASVYAWNR

SEQ ID NO: 333 - protein, 15 aa, Artificial Sequence
  Synthetic
RFASVYAWNRKRISN

SEQ ID NO: 334 - protein, 15 aa, Artificial Sequence
  Synthetic
YAWNRKRISNCVADY

SEQ ID NO: 335 - protein, 15 aa, Artificial Sequence
  Synthetic
KRISNCVADYSVLYN

SEQ ID NO: 336 - protein, 15 aa, Artificial Sequence
  Synthetic
CVADYSVLYNSASFS

SEQ ID NO: 337 - protein, 15 aa, Artificial Sequence
  Synthetic
SVLYNSASFSTFKCY

SEQ ID NO: 338 - protein, 15 aa, Artificial Sequence
  Synthetic
SASFSTFKCYGVSPT

SEQ ID NO: 339 - protein, 15 aa, Artificial Sequence
  Synthetic
TFKCYGVSPTKLNDL

SEQ ID NO: 340 - protein, 15 aa, Artificial Sequence
  Synthetic
GVSPTKLNDLCFTNV

SEQ ID NO: 341 - protein, 15 aa, Artificial Sequence
  Synthetic
KLNDLCFTNVYADSF

SEQ ID NO: 342 - protein, 15 aa, Artificial Sequence
  Synthetic
YADSFVIRGDEVRQI

SEQ ID NO: 343 - protein, 15 aa, Artificial Sequence
  Synthetic
VIRGDEVRQIAPGQT

SEQ ID NO: 344 - protein, 15 aa, Artificial Sequence
  Synthetic
GKIADYNYKLPDDFT

SEQ ID NO: 345 - protein, 15 aa, Artificial Sequence
  Synthetic
GCVIAWNSNNLDSKV

SEQ ID NO: 346 - protein, 15 aa, Artificial Sequence
  Synthetic
WNSNNLDSKVGGNYN

SEQ ID NO: 347 - protein, 15 aa, Artificial Sequence
  Synthetic
GGNYNYLYRLFRKSN

SEQ ID NO: 348 - protein, 15 aa, Artificial Sequence
  Synthetic
YNYLYRLFRKSNLKP

SEQ ID NO: 349 - protein, 15 aa, Artificial Sequence
  Synthetic
YLYRLFRKSNLKPFE

SEQ ID NO: 350 - protein, 15 aa, Artificial Sequence
  Synthetic
LKPFERDISTEIYQA

SEQ ID NO: 351 - protein, 15 aa, Artificial Sequence
  Synthetic
EIYQAGSTPCNGVEG

SEQ ID NO: 352 - protein, 15 aa, Artificial Sequence
  Synthetic
NGVEGFNCYFPLQSY

SEQ ID NO: 353 - protein, 15 aa, Artificial Sequence
  Synthetic
FNCYFPLQSYGFQPT

SEQ ID NO: 354 - protein, 15 aa, Artificial Sequence
  Synthetic
QPYRVVVLSFELLHA

SEQ ID NO: 355 - protein, 15 aa, Artificial Sequence
  Synthetic
VVLSFELLHAPATVC

SEQ ID NO: 356 - protein, 15 aa, Artificial Sequence
  Synthetic
FNFNGLTGTGVLTES

SEQ ID NO: 357 - protein, 15 aa, Artificial Sequence
  Synthetic
LTGTGVLTESNKKFL

SEQ ID NO: 358 - protein, 15 aa, Artificial Sequence
  Synthetic
TLEILDITPCSFGGV

SEQ ID NO: 359 - protein, 15 aa, Artificial Sequence
  Synthetic
VNNSYECDIPIGAGI

SEQ ID NO: 360 - protein, 15 aa, Artificial Sequence
  Synthetic
ECDIPIGAGICASYQ

SEQ ID NO: 361 - protein, 15 aa, Artificial Sequence
  Synthetic
SIIAYTMSLGAENSV

SEQ ID NO: 362 - protein, 15 aa, Artificial Sequence
  Synthetic
AENSVAYSNNSIAIP

SEQ ID NO: 363 - protein, 15 aa, Artificial Sequence
  Synthetic
AYSNNSIAIPTNFTI

SEQ ID NO: 364 - protein, 15 aa, Artificial Sequence
  Synthetic
SIAIPTNFTISVTTE

SEQ ID NO: 365 - protein, 15 aa, Artificial Sequence
  Synthetic
TNFTISVTTEILPVS

SEQ ID NO: 366 - protein, 15 aa, Artificial Sequence
  Synthetic
SVTTEILPVSMTKTS

SEQ ID NO: 367 - protein, 15 aa, Artificial Sequence
  Synthetic
STECSNLLLQYGSFC

SEQ ID NO: 368 - protein, 15 aa, Artificial Sequence
  Synthetic
NLLLQYGSFCTQLNR

SEQ ID NO: 369 - protein, 15 aa, Artificial Sequence
  Synthetic
YGSFCTQLNRALTGI

SEQ ID NO: 370 - protein, 15 aa, Artificial Sequence
  Synthetic
TQLNRALTGIAVEQD

SEQ ID NO: 371 - protein, 15 aa, Artificial Sequence
  Synthetic
KNTQEVFAQVKQIYK

SEQ ID NO: 372 - protein, 15 aa, Artificial Sequence
  Synthetic
VFAQVKQIYKTPPIK

SEQ ID NO: 373 - protein, 15 aa, Artificial Sequence
  Synthetic
TPPIKDFGGFNFSQI

SEQ ID NO: 374 - protein, 15 aa, Artificial Sequence
  Synthetic
NFSQILPDPSKPSKR

SEQ ID NO: 375 - protein, 15 aa, Artificial Sequence
  Synthetic
LPDPSKPSKRSFIED

SEQ ID NO: 376 - protein, 15 aa, Artificial Sequence
  Synthetic
KPSKRSFIEDLLFNK

SEQ ID NO: 377 - protein, 15 aa, Artificial Sequence
  Synthetic
SFIEDLLFNKVTLAD

SEQ ID NO: 378 - protein, 15 aa, Artificial Sequence
  Synthetic
LLFNKVTLADAGFIK

SEQ ID NO: 379 - protein, 15 aa, Artificial Sequence
  Synthetic
VTLADAGFIKQYGDC

SEQ ID NO: 380 - protein, 15 aa, Artificial Sequence
  Synthetic
AGFIKQYGDCLGDIA

SEQ ID NO: 381 - protein, 15 aa, Artificial Sequence
  Synthetic
QYGDCLGDIAARDLI

SEQ ID NO: 382 - protein, 15 aa, Artificial Sequence
  Synthetic
LGDIAARDLICAQKF

SEQ ID NO: 383 - protein, 15 aa, Artificial Sequence
  Synthetic
ARDLICAQKFNGLTV

SEQ ID NO: 384 - protein, 15 aa, Artificial Sequence
  Synthetic
CAQKFNGLTVLPPLL

SEQ ID NO: 385 - protein, 15 aa, Artificial Sequence
  Synthetic
FNGLTVLPPLLTDEM

SEQ ID NO: 386 - protein, 15 aa, Artificial Sequence
  Synthetic
LPPLLTDEMIAQYTS

SEQ ID NO: 387 - protein, 15 aa, Artificial Sequence
  Synthetic
TDEMIAQYTSALLAG

SEQ ID NO: 388 - protein, 15 aa, Artificial Sequence
  Synthetic
AQYTSALLAGTITSG

SEQ ID NO: 389 - protein, 15 aa, Artificial Sequence
  Synthetic
ALLAGTITSGWTFGA

SEQ ID NO: 390 - protein, 15 aa, Artificial Sequence
  Synthetic
TITSGWTFGAGAALQ

SEQ ID NO: 391 - protein, 15 aa, Artificial Sequence
  Synthetic
WTFGAGAALQIPFAM

SEQ ID NO: 392 - protein, 15 aa, Artificial Sequence
  Synthetic
IPFAMQMAYRFNGIG

SEQ ID NO: 393 - protein, 15 aa, Artificial Sequence
  Synthetic
QMAYRFNGIGVTQNV

SEQ ID NO: 394 - protein, 15 aa, Artificial Sequence
  Synthetic
VTQNVLYENQKLIAN

SEQ ID NO: 395 - protein, 15 aa, Artificial Sequence
  Synthetic
LYENQKLIANQFNSA

SEQ ID NO: 396 - protein, 15 aa, Artificial Sequence
  Synthetic
GKLQDVVNQNAQALN

SEQ ID NO: 397 - protein, 15 aa, Artificial Sequence
  Synthetic
AQALNTLVKQLSSNF

SEQ ID NO: 398 - protein, 15 aa, Artificial Sequence
  Synthetic
TLVKQLSSNFGAISS

SEQ ID NO: 399 - protein, 15 aa, Artificial Sequence
  Synthetic
GAISSVLNDILSRLD

SEQ ID NO: 400 - protein, 15 aa, Artificial Sequence
  Synthetic
VQIDRLITGRLQSLQ

SEQ ID NO: 401 - protein, 15 aa, Artificial Sequence
  Synthetic
LITGRLQSLQTYVTQ

SEQ ID NO: 402 - protein, 15 aa, Artificial Sequence
  Synthetic
APHGVVFLHVTYVPA

SEQ ID NO: 403 - protein, 15 aa, Artificial Sequence
  Synthetic
TTAPAICHDGKAHFP

SEQ ID NO: 404 - protein, 15 aa, Artificial Sequence
  Synthetic
KAHFPREGVFVSNGT

SEQ ID NO: 405 - protein, 15 aa, Artificial Sequence
  Synthetic
REGVFVSNGTHWFVT

SEQ ID NO: 406 - protein, 15 aa, Artificial Sequence
  Synthetic
HWFVTQRNFYEPQII

SEQ ID NO: 407 - protein, 15 aa, Artificial Sequence
  Synthetic
QRNFYEPQIITTDNT

SEQ ID NO: 408 - protein, 15 aa, Artificial Sequence
  Synthetic
FVSGNCDVVIGIVNN

SEQ ID NO: 409 - protein, 15 aa, Artificial Sequence
  Synthetic
GIVNNTVYDPLQPEL

SEQ ID NO: 410 - protein, 15 aa, Artificial Sequence
  Synthetic
LQPELDSFKEELDKY

SEQ ID NO: 411 - protein, 15 aa, Artificial Sequence
  Synthetic
ELDKYFKNHTSPDVD

SEQ ID NO: 412 - protein, 15 aa, Artificial Sequence
  Synthetic
LGDISGINASVVNIQ

SEQ ID NO: 413 - protein, 15 aa, Artificial Sequence
  Synthetic
GINASVVNIQKEIDR

SEQ ID NO: 414 - protein, 15 aa, Artificial Sequence
  Synthetic
LNEVAKNLNESLIDL

SEQ ID NO: 415 - protein, 15 aa, Artificial Sequence
  Synthetic
QELGKYEQYIKWPWY

SEQ ID NO: 416 - protein, 15 aa, Artificial Sequence
  Synthetic
YEQYIKWPWYIWLGF

SEQ ID NO: 417 - protein, 9 aa, Artificial Sequence
  Synthetic
SEETGTLIV

SEQ ID NO: 418 - protein, 8 aa, Artificial Sequence
  Synthetic
FLAFVVFL

SEQ ID NO: 419 - protein, 9 aa, Artificial Sequence
  Synthetic
FLLVTLAIL

SEQ ID NO: 420 - protein, 9 aa, Artificial Sequence
  Synthetic
SLVKPSFYV

SEQ ID NO: 421 - protein, 9 aa, Artificial Sequence
  Synthetic
LVKPSFYVY

SEQ ID NO: 422 - protein, 10 aa, Artificial Sequence
  Synthetic
FYVYSRVKNL

SEQ ID NO: 423 - protein, 9 aa, Artificial Sequence
  Synthetic
YVYSRVKNL

SEQ ID NO: 424 - protein, 10 aa, Artificial Sequence
  Synthetic
NGTITVEELK

SEQ ID NO: 425 - protein, 9 aa, Artificial Sequence
  Synthetic
GTITVEELK

SEQ ID NO: 426 - protein, 9 aa, Artificial Sequence
  Synthetic
KLLEQWNLV

SEQ ID NO: 427 - protein, 9 aa, Artificial Sequence
  Synthetic
FLFLTWICL

SEQ ID NO: 428 - protein, 9 aa, Artificial Sequence
  Synthetic
WICLLQFAY

SEQ ID NO: 429 - protein, 13 aa, Artificial Sequence
  Synthetic
LQFAYANRNRFLY

SEQ ID NO: 430 - protein, 9 aa, Artificial Sequence
  Synthetic
FAYANRNRF

SEQ ID NO: 431 - protein, 8 aa, Artificial Sequence
  Synthetic
AYANRNRF

SEQ ID NO: 432 - protein, 9 aa, Artificial Sequence
  Synthetic
AYANRNRFL

SEQ ID NO: 433 - protein, 9 aa, Artificial Sequence
  Synthetic
YANRNRFLY

SEQ ID NO: 434 - protein, 9 aa, Artificial Sequence
  Synthetic
ANRNRFLYI

SEQ ID NO: 435 - protein, 9 aa, Artificial Sequence
  Synthetic
RNRFLYIIK

SEQ ID NO: 436 - protein, 10 aa, Artificial Sequence
  Synthetic
RNRFLYIIKL

SEQ ID NO: 437 - protein, 9 aa, Artificial Sequence
  Synthetic
NRFLYIIKL

SEQ ID NO: 438 - protein, 10 aa, Artificial Sequence
  Synthetic
RFLYIIKLIF

SEQ ID NO: 439 - protein, 10 aa, Artificial Sequence
  Synthetic
FLWLLWPVTL

SEQ ID NO: 440 - protein, 9 aa, Artificial Sequence
  Synthetic
WLLWPVTLA

SEQ ID NO: 441 - protein, 9 aa, Artificial Sequence
  Synthetic
LLWPVTLAC

SEQ ID NO: 442 - protein, 10 aa, Artificial Sequence
  Synthetic
TLACFVLAAV

SEQ ID NO: 443 - protein, 9 aa, Artificial Sequence
  Synthetic
FVLAAVYRI

SEQ ID NO: 444 - protein, 9 aa, Artificial Sequence
  Synthetic
LAAVYRINW

SEQ ID NO: 445 - protein, 10 aa, Artificial Sequence
  Synthetic
LAAVYRINWI

SEQ ID NO: 446 - protein, 8 aa, Artificial Sequence
  Synthetic
AAVYRINW

SEQ ID NO: 447 - protein, 11 aa, Artificial Sequence
  Synthetic
AIAMACLVGLM

SEQ ID NO: 448 - protein, 9 aa, Artificial Sequence
  Synthetic
MACLVGLMW

SEQ ID NO: 449 - protein, 9 aa, Artificial Sequence
  Synthetic
GLMWLSYFI

SEQ ID NO: 450 - protein, 9 aa, Artificial Sequence
  Synthetic
LSYFIASFR

SEQ ID NO: 451 - protein, 11 aa, Artificial Sequence
  Synthetic
SYFIASFRLFA

SEQ ID NO: 452 - protein, 9 aa, Artificial Sequence
  Synthetic
IASFRLFAR

SEQ ID NO: 453 - protein, 10 aa, Artificial Sequence
  Synthetic
FRLFARTRSM

SEQ ID NO: 454 - protein, 9 aa, Artificial Sequence
  Synthetic
RLFARTRSM

SEQ ID NO: 455 - protein, 10 aa, Artificial Sequence
  Synthetic
RLFARTRSMW

SEQ ID NO: 456 - protein, 8 aa, Artificial Sequence
  Synthetic
RTRSMWSF

SEQ ID NO: 457 - protein, 9 aa, Artificial Sequence
  Synthetic
SMWSFNPET

SEQ ID NO: 458 - protein, 12 aa, Artificial Sequence
  Synthetic
SMWSFNPETNIL

SEQ ID NO: 459 - protein, 9 aa, Artificial Sequence
  Synthetic
SFNPETNIL

SEQ ID NO: 460 - protein, 8 aa, Artificial Sequence
  Synthetic
VPLHGTIL

SEQ ID NO: 461 - protein, 8 aa, Artificial Sequence
  Synthetic
RPLLESEL

SEQ ID NO: 462 - protein, 9 aa, Artificial Sequence
  Synthetic
SELVIGAVI

SEQ ID NO: 463 - protein, 10 aa, Artificial Sequence
  Synthetic
SELVIGAVIL

SEQ ID NO: 464 - protein, 10 aa, Artificial Sequence
  Synthetic
ELVIGAVILR

SEQ ID NO: 465 - protein, 9 aa, Artificial Sequence
  Synthetic
LVIGAVILR

SEQ ID NO: 466 - protein, 9 aa, Artificial Sequence
  Synthetic
AVILRGHLR

SEQ ID NO: 467 - protein, 11 aa, Artificial Sequence
  Synthetic
HLRIAGHHLGR

SEQ ID NO: 468 - protein, 9 aa, Artificial Sequence
  Synthetic
HLRIAGHHL

SEQ ID NO: 469 - protein, 9 aa, Artificial Sequence
  Synthetic
RIAGHHLGR

SEQ ID NO: 470 - protein, 9 aa, Artificial Sequence
  Synthetic
LPKEITVAT

SEQ ID NO: 471 - protein, 12 aa, Artificial Sequence
  Synthetic
TVATSRTLSYYK

SEQ ID NO: 472 - protein, 10 aa, Artificial Sequence
  Synthetic
TVATSRTLSY

SEQ ID NO: 473 - protein, 10 aa, Artificial Sequence
  Synthetic
VATSRTLSYY

SEQ ID NO: 474 - protein, 9 aa, Artificial Sequence
  Synthetic
VATSRTLSY

SEQ ID NO: 475 - protein, 10 aa, Artificial Sequence
  Synthetic
ATSRTLSYYK

SEQ ID NO: 476 - protein, 9 aa, Artificial Sequence
  Synthetic
ATSRTLSYY

SEQ ID NO: 477 - protein, 14 aa, Artificial Sequence
  Synthetic
ASQRVAGDSGFAAY

SEQ ID NO: 478 - protein, 10 aa, Artificial Sequence
  Synthetic
SQRVAGDSGF

SEQ ID NO: 479 - protein, 14 aa, Artificial Sequence
  Synthetic
RVAGDSGFAAYSRY

SEQ ID NO: 480 - protein, 11 aa, Artificial Sequence
  Synthetic
RVAGDSGFAAY

SEQ ID NO: 481 - protein, 9 aa, Artificial Sequence
  Synthetic
AGDSGFAAY

SEQ ID NO: 482 - protein, 9 aa, Artificial Sequence
  Synthetic
DSGFAAYSR

SEQ ID NO: 483 - protein, 10 aa, Artificial Sequence
  Synthetic
YSRYRIGNYK

SEQ ID NO: 484 - protein, 9 aa, Artificial Sequence
  Synthetic
RYRIGNYKL

SEQ ID NO: 485 - protein, 9 aa, Artificial Sequence
  Synthetic
SSSDNIALL

SEQ ID NO: 486 - protein, 13 aa, Artificial Sequence
  Synthetic
GPQNQRNAPRITF

SEQ ID NO: 487 - protein, 9 aa, Artificial Sequence
  Synthetic
QRNAPRITF

SEQ ID NO: 488 - protein, 10 aa, Artificial Sequence
  Synthetic
RPQGLPNNTA

SEQ ID NO: 489 - protein, 10 aa, Artificial Sequence
  Synthetic
QGLPNNTASW

SEQ ID NO: 490 - protein, 9 aa, Artificial Sequence
  Synthetic
LPNNTASWF

SEQ ID NO: 491 - protein, 9 aa, Artificial Sequence
  Synthetic
NTASWFTAL

SEQ ID NO: 492 - protein, 10 aa, Artificial Sequence
  Synthetic
KFPRGQGVPI

SEQ ID NO: 493 - protein, 9 aa, Artificial Sequence
  Synthetic
FPRGQGVPI

SEQ ID NO: 494 - protein, 13 aa, Artificial Sequence
  Synthetic
NTNSSPDDQIGYY

SEQ ID NO: 495 - protein, 11 aa, Artificial Sequence
  Synthetic
SSPDDQIGYYR

SEQ ID NO: 496 - protein, 9 aa, Artificial Sequence
  Synthetic
SPDDQIGYY

SEQ ID NO: 497 - protein, 10 aa, Artificial Sequence
  Synthetic
YYRRATRRIR

SEQ ID NO: 498 - protein, 10 aa, Artificial Sequence
  Synthetic
RIRGGDGKMK

SEQ ID NO: 499 - protein, 9 aa, Artificial Sequence
  Synthetic
KMKDLSPRW

SEQ ID NO: 500 - protein, 9 aa, Artificial Sequence
  Synthetic
MKDLSPRWY

SEQ ID NO: 501 - protein, 10 aa, Artificial Sequence
  Synthetic
LSPRWYFYYL

SEQ ID NO: 502 - protein, 9 aa, Artificial Sequence
  Synthetic
SPRWYFYYL

SEQ ID NO: 503 - protein, 10 aa, Artificial Sequence
  Synthetic
YLGTGPEAGL

SEQ ID NO: 504 - protein, 10 aa, Artificial Sequence
  Synthetic
GTGPEAGLPY

SEQ ID NO: 505 - protein, 9 aa, Artificial Sequence
  Synthetic
AGLPYGANK

SEQ ID NO: 506 - protein, 10 aa, Artificial Sequence
  Synthetic
LPYGANKDGI

SEQ ID NO: 507 - protein, 10 aa, Artificial Sequence
  Synthetic
YGANKDGIIW

SEQ ID NO: 508 - protein, 9 aa, Artificial Sequence
  Synthetic
IIWVATEGA

SEQ ID NO: 509 - protein, 10 aa, Artificial Sequence
  Synthetic
ATEGALNTPK

SEQ ID NO: 510 - protein, 13 aa, Artificial Sequence
  Synthetic
ATEGALNTPKDHI

SEQ ID NO: 511 - protein, 9 aa, Artificial Sequence
  Synthetic
GTRNPANNA

SEQ ID NO: 512 - protein, 11 aa, Artificial Sequence
  Synthetic
RNPANNAAIVL

SEQ ID NO: 513 - protein, 10 aa, Artificial Sequence
  Synthetic
NPANNAAIVL

SEQ ID NO: 514 - protein, 10 aa, Artificial Sequence
  Synthetic
VLQLPQGTTL

SEQ ID NO: 515 - protein, 10 aa, Artificial Sequence
  Synthetic
AEGSRGGSQA

SEQ ID NO: 516 - protein, 10 aa, Artificial Sequence
  Synthetic
SQASSRSSSR

SEQ ID NO: 517 - protein, 9 aa, Artificial Sequence
  Synthetic
SSRGTSPAR

SEQ ID NO: 518 - protein, 9 aa, Artificial Sequence
  Synthetic
LALLLLDRL

SEQ ID NO: 519 - protein, 10 aa, Artificial Sequence
  Synthetic
LLLLDRLNQL

SEQ ID NO: 520 - protein, 9 aa, Artificial Sequence
  Synthetic
LLLDRLNQL

SEQ ID NO: 521 - protein, 10 aa, Artificial Sequence
  Synthetic
QQQQGQTVTK

SEQ ID NO: 522 - protein, 9 aa, Artificial Sequence
  Synthetic
KSAAEASKK

SEQ ID NO: 523 - protein, 9 aa, Artificial Sequence
  Synthetic
KPRQKRTAT

SEQ ID NO: 524 - protein, 9 aa, Artificial Sequence
  Synthetic
RTATKAYNV

SEQ ID NO: 525 - protein, 9 aa, Artificial Sequence
  Synthetic
KAYNVTQAF

SEQ ID NO: 526 - protein, 11 aa, Artificial Sequence
  Synthetic
RRGPEQTQGNF

SEQ ID NO: 527 - protein, 10 aa, Artificial Sequence
  Synthetic
QELIRQGTDY

SEQ ID NO: 528 - protein, 13 aa, Artificial Sequence
  Synthetic
QELIRQGTDYKHW

SEQ ID NO: 529 - protein, 9 aa, Artificial Sequence
  Synthetic
ELIRQGTDY

SEQ ID NO: 530 - protein, 11 aa, Artificial Sequence
  Synthetic
DYKHWPQIAQF

SEQ ID NO: 531 - protein, 8 aa, Artificial Sequence
  Synthetic
HWPQIAQF

SEQ ID NO: 532 - protein, 9 aa, Artificial Sequence
  Synthetic
AQFAPSASA

SEQ ID NO: 533 - protein, 10 aa, Artificial Sequence
  Synthetic
AQFAPSASAF

SEQ ID NO: 534 - protein, 10 aa, Artificial Sequence
  Synthetic
QFAPSASAFF

SEQ ID NO: 535 - protein, 9 aa, Artificial Sequence
  Synthetic
FAPSASAFF

SEQ ID NO: 536 - protein, 10 aa, Artificial Sequence
  Synthetic
APSASAFFGM

SEQ ID NO: 537 - protein, 10 aa, Artificial Sequence
  Synthetic
SASAFFGMSR

SEQ ID NO: 538 - protein, 9 aa, Artificial Sequence
  Synthetic
ASAFFGMSR

SEQ ID NO: 539 - protein, 9 aa, Artificial Sequence
  Synthetic
GMSRIGMEV

SEQ ID NO: 540 - protein, 13 aa, Artificial Sequence
  Synthetic
GMEVTPSGTWLTY

SEQ ID NO: 541 - protein, 9 aa, Artificial Sequence
  Synthetic
MEVTPSGTW

SEQ ID NO: 542 - protein, 10 aa, Artificial Sequence
  Synthetic
MEVTPSGTWL

SEQ ID NO: 543 - protein, 11 aa, Artificial Sequence
  Synthetic
EVTPSGTWLTY

SEQ ID NO: 544 - protein, 10 aa, Artificial Sequence
  Synthetic
VTPSGTWLTY

SEQ ID NO: 545 - protein, 9 aa, Artificial Sequence
  Synthetic
TPSGTWLTY

SEQ ID NO: 546 - protein, 9 aa, Artificial Sequence
  Synthetic
KLDDKDPNF

SEQ ID NO: 547 - protein, 9 aa, Artificial Sequence
  Synthetic
ILLNKHIDA

SEQ ID NO: 548 - protein, 9 aa, Artificial Sequence
  Synthetic
LLNKHIDAY

SEQ ID NO: 549 - protein, 11 aa, Artificial Sequence
  Synthetic
AYKTFPPTEPK

SEQ ID NO: 550 - protein, 10 aa, Artificial Sequence
  Synthetic
YKTFPPTEPK

SEQ ID NO: 551 - protein, 10 aa, Artificial Sequence
  Synthetic
KTFPPTEPKK

SEQ ID NO: 552 - protein, 9 aa, Artificial Sequence
  Synthetic
KTFPPTEPK

SEQ ID NO: 553 - protein, 14 aa, Artificial Sequence
  Synthetic
KTFPPTEPKKDKKK

SEQ ID NO: 554 - protein, 9 aa, Artificial Sequence
  Synthetic
KKQQTVTLL

SEQ ID NO: 555 - protein, 9 aa, Artificial Sequence
  Synthetic
LPAADLDDF

SEQ ID NO: 556 - protein, 11 aa, Artificial Sequence
  Synthetic
AADLDDFSKQL

SEQ ID NO: 557 - protein, 9 aa, Artificial Sequence
  Synthetic
FSKQLQQSM

SEQ ID NO: 558 - protein, 9 aa, Artificial Sequence
  Synthetic
VLSEARQHL

SEQ ID NO: 559 - protein, 9 aa, Artificial Sequence
  Synthetic
HLKDGTCGL

SEQ ID NO: 560 - protein, 10 aa, Artificial Sequence
  Synthetic
APHGHVMVEL

SEQ ID NO: 561 - protein, 9 aa, Artificial Sequence
  Synthetic
VMVELVAEL

SEQ ID NO: 562 - protein, 9 aa, Artificial Sequence
  Synthetic
VPHVGEIPV

SEQ ID NO: 563 - protein, 9 aa, Artificial Sequence
  Synthetic
HVGEIPVAY

SEQ ID NO: 564 - protein, 10 aa, Artificial Sequence
  Synthetic
IPVAYRKVLL

SEQ ID NO: 565 - protein, 9 aa, Artificial Sequence
  Synthetic
TFNGECPNF

SEQ ID NO: 566 - protein, 9 aa, Artificial Sequence
  Synthetic
KTIQPRVEK

SEQ ID NO: 567 - protein, 9 aa, Artificial Sequence
  Synthetic
GFMGRIRSV

SEQ ID NO: 568 - protein, 12 aa, Artificial Sequence
  Synthetic
SEVGPEHSLAEY

SEQ ID NO: 569 - protein, 10 aa, Artificial Sequence
  Synthetic
EEIAIILASF

SEQ ID NO: 570 - protein, 11 aa, Artificial Sequence
  Synthetic
AIILASFSAST

SEQ ID NO: 571 - protein, 9 aa, Artificial Sequence
  Synthetic
ILSPLYAFA

SEQ ID NO: 572 - protein, 9 aa, Artificial Sequence
  Synthetic
VRSIFSRTL

SEQ ID NO: 573 - protein, 10 aa, Artificial Sequence
  Synthetic
ITILDGISQY

SEQ ID NO: 574 - protein, 9 aa, Artificial Sequence
  Synthetic
RLIDAMMFT

SEQ ID NO: 575 - protein, 14 aa, Artificial Sequence
  Synthetic
TSDLATNNLVVMAY

SEQ ID NO: 576 - protein, 9 aa, Artificial Sequence
  Synthetic
TVYEKLKPV

SEQ ID NO: 577 - protein, 8 aa, Artificial Sequence
  Synthetic
YEKLKPVL

SEQ ID NO: 578 - protein, 9 aa, Artificial Sequence
  Synthetic
EIKESVQTF

SEQ ID NO: 579 - protein, 9 aa, Artificial Sequence
  Synthetic
KLVNKFLAL

SEQ ID NO: 580 - protein, 13 aa, Artificial Sequence
  Synthetic
APKEIIFLEGETL

SEQ ID NO: 581 - protein, 8 aa, Artificial Sequence
  Synthetic
APKEIIFL

SEQ ID NO: 582 - protein, 9 aa, Artificial Sequence
  Synthetic
GETLPTEVL

SEQ ID NO: 583 - protein, 9 aa, Artificial Sequence
  Synthetic
VTNNTFTLK

SEQ ID NO: 584 - protein, 9 aa, Artificial Sequence
  Synthetic
FGDDTVIEV

SEQ ID NO: 585 - protein, 10 aa, Artificial Sequence
  Synthetic
DTVIEVQGYK

SEQ ID NO: 586 - protein, 10 aa, Artificial Sequence
  Synthetic
QGYKSVNITF

SEQ ID NO: 587 - protein, 10 aa, Artificial Sequence
  Synthetic
FELDERIDKV

SEQ ID NO: 588 - protein, 11 aa, Artificial Sequence
  Synthetic
FELDERIDKVL

SEQ ID NO: 589 - protein, 9 aa, Artificial Sequence
  Synthetic
ELDERIDKV

SEQ ID NO: 590 - protein, 9 aa, Artificial Sequence
  Synthetic
VLNEKCSAY

SEQ ID NO: 591 - protein, 10 aa, Artificial Sequence
  Synthetic
VELGTEVNEF

SEQ ID NO: 592 - protein, 9 aa, Artificial Sequence
  Synthetic
SELLTPLGI

SEQ ID NO: 593 - protein, 9 aa, Artificial Sequence
  Synthetic
YLFDESGEF

SEQ ID NO: 594 - protein, 11 aa, Artificial Sequence
  Synthetic
YLFDESGEFKL

SEQ ID NO: 595 - protein, 9 aa, Artificial Sequence
  Synthetic
FEPSTQYEY

SEQ ID NO: 596 - protein, 10 aa, Artificial Sequence
  Synthetic
DDYQGKPLEF

SEQ ID NO: 597 - protein, 12 aa, Artificial Sequence
  Synthetic
KPLEFGATSAAL

SEQ ID NO: 598 - protein, 10 aa, Artificial Sequence
  Synthetic
LEFGATSAAL

SEQ ID NO: 599 - protein, 9 aa, Artificial Sequence
  Synthetic
VEVQPQLEM

SEQ ID NO: 600 - protein, 9 aa, Artificial Sequence
  Synthetic
LEMELTPVV

SEQ ID NO: 601 - protein, 10 aa, Artificial Sequence
  Synthetic
MELTPVVQTI

SEQ ID NO: 602 - protein, 9 aa, Artificial Sequence
  Synthetic
TPVVQTIEV

SEQ ID NO: 603 - protein, 10 aa, Artificial Sequence
  Synthetic
TIEVNSFSGY

SEQ ID NO: 604 - protein, 9 aa, Artificial Sequence
  Synthetic
IEVNSFSGY

SEQ ID NO: 605 - protein, 9 aa, Artificial Sequence
  Synthetic
NSFSGYLKL

SEQ ID NO: 606 - protein, 9 aa, Artificial Sequence
  Synthetic
YLKLTDNVY

SEQ ID NO: 607 - protein, 11 aa, Artificial Sequence
  Synthetic
YLKLTDNVYIK

SEQ ID NO: 608 - protein, 9 aa, Artificial Sequence
  Synthetic
EAKKVKPTV

SEQ ID NO: 609 - protein, 9 aa, Artificial Sequence
  Synthetic
VVVNAANVY

SEQ ID NO: 610 - protein, 9 aa, Artificial Sequence
  Synthetic
YIATNGPLK

SEQ ID NO: 611 - protein, 9 aa, Artificial Sequence
  Synthetic
YENFNQHEV

SEQ ID NO: 612 - protein, 9 aa, Artificial Sequence
  Synthetic
LLSAGIFGA

SEQ ID NO: 613 - protein, 9 aa, Artificial Sequence
  Synthetic
GADPIHSLR

SEQ ID NO: 614 - protein, 9 aa, Artificial Sequence
  Synthetic
RTNVYLAVF

SEQ ID NO: 615 - protein, 10 aa, Artificial Sequence
  Synthetic
AVFDKNLYDK

SEQ ID NO: 616 - protein, 11 aa, Artificial Sequence
  Synthetic
NLYDKLVSSFL

SEQ ID NO: 617 - protein, 9 aa, Artificial Sequence
  Synthetic
LYDKLVSSF

SEQ ID NO: 618 - protein, 9 aa, Artificial Sequence
  Synthetic
KLVSSFLEM

SEQ ID NO: 619 - protein, 10 aa, Artificial Sequence
  Synthetic
KIAEIPKEEV

SEQ ID NO: 620 - protein, 10 aa, Artificial Sequence
  Synthetic
EVKPFITESK

SEQ ID NO: 621 - protein, 9 aa, Artificial Sequence
  Synthetic
ESKPSVEQR

SEQ ID NO: 622 - protein, 10 aa, Artificial Sequence
  Synthetic
FLTENLLLYI

SEQ ID NO: 623 - protein, 9 aa, Artificial Sequence
  Synthetic
LVSDIDITF

SEQ ID NO: 624 - protein, 9 aa, Artificial Sequence
  Synthetic
APYIVGDVV

SEQ ID NO: 625 - protein, 9 aa, Artificial Sequence
  Synthetic
LTAVVIPTK

SEQ ID NO: 626 - protein, 10 aa, Artificial Sequence
  Synthetic
ALRKVPTDNY

SEQ ID NO: 627 - protein, 14 aa, Artificial Sequence
  Synthetic
ALRKVPTDNYITTY

SEQ ID NO: 628 - protein, 9 aa, Artificial Sequence
  Synthetic
PTDNYITTY

SEQ ID NO: 629 - protein, 8 aa, Artificial Sequence
  Synthetic
TDNYITTY

SEQ ID NO: 630 - protein, 11 aa, Artificial Sequence
  Synthetic
TTYPGQGLNGY

SEQ ID NO: 631 - protein, 10 aa, Artificial Sequence
  Synthetic
KQEILGTVSW

SEQ ID NO: 632 - protein, 9 aa, Artificial Sequence
  Synthetic
QEILGTVSW

SEQ ID NO: 633 - protein, 9 aa, Artificial Sequence
  Synthetic
MLAHAEETR

SEQ ID NO: 634 - protein, 9 aa, Artificial Sequence
  Synthetic
AHAEETRKL

SEQ ID NO: 635 - protein, 9 aa, Artificial Sequence
  Synthetic
KLMPVCVET

SEQ ID NO: 636 - protein, 11 aa, Artificial Sequence
  Synthetic
AIVSTIQRKYK

SEQ ID NO: 637 - protein, 9 aa, Artificial Sequence
  Synthetic
AIVSTIQRK

SEQ ID NO: 638 - protein, 9 aa, Artificial Sequence
  Synthetic
VVDYGARFY

SEQ ID NO: 639 - protein, 9 aa, Artificial Sequence
  Synthetic
SLINTLNDL

SEQ ID NO: 640 - protein, 10 aa, Artificial Sequence
  Synthetic
VSSPDAVTAY

SEQ ID NO: 641 - protein, 9 aa, Artificial Sequence
  Synthetic
TISLAGSYK

SEQ ID NO: 642 - protein, 10 aa, Artificial Sequence
  Synthetic
ISLAGSYKDW

SEQ ID NO: 643 - protein, 11 aa, Artificial Sequence
  Synthetic
SVYYTSNPTTF

SEQ ID NO: 644 - protein, 9 aa, Artificial Sequence
  Synthetic
YYTSNPTTF

SEQ ID NO: 645 - protein, 11 aa, Artificial Sequence
  Synthetic
YYTSNPTTFHL

SEQ ID NO: 646 - protein, 9 aa, Artificial Sequence
  Synthetic
TSNPTTFHL

SEQ ID NO: 647 - protein, 9 aa, Artificial Sequence
  Synthetic
HLDGEVITF

SEQ ID NO: 648 - protein, 9 aa, Artificial Sequence
  Synthetic
GEVITFDNL

SEQ ID NO: 649 - protein, 9 aa, Artificial Sequence
  Synthetic
ITFDNLKTL

SEQ ID NO: 650 - protein, 8 aa, Artificial Sequence
  Synthetic
NLKTLLSL

SEQ ID NO: 651 - protein, 9 aa, Artificial Sequence
  Synthetic
RTIKVFTTV

SEQ ID NO: 652 - protein, 9 aa, Artificial Sequence
  Synthetic
NINLHTQVV

SEQ ID NO: 653 - protein, 11 aa, Artificial Sequence
  Synthetic
HTQVVDMSMTY

SEQ ID NO: 654 - protein, 9 aa, Artificial Sequence
  Synthetic
QVVDMSMTY

SEQ ID NO: 655 - protein, 9 aa, Artificial Sequence
  Synthetic
MSMTYGQQF

SEQ ID NO: 656 - protein, 11 aa, Artificial Sequence
  Synthetic
KPHNSHEGKTF

SEQ ID NO: 657 - protein, 9 aa, Artificial Sequence
  Synthetic
LRVEAFEYY

SEQ ID NO: 658 - protein, 11 aa, Artificial Sequence
  Synthetic
FEYYHTTDPSF

SEQ ID NO: 659 - protein, 10 aa, Artificial Sequence
  Synthetic
HTTDPSFLGR

SEQ ID NO: 660 - protein, 11 aa, Artificial Sequence
  Synthetic
HTTDPSFLGRY

SEQ ID NO: 661 - protein, 10 aa, Artificial Sequence
  Synthetic
TTDPSFLGRY

SEQ ID NO: 662 - protein, 11 aa, Artificial Sequence
  Synthetic
TTDPSFLGRYM

SEQ ID NO: 663 - protein, 9 aa, Artificial Sequence
  Synthetic
FLGRYMSAL

SEQ ID NO: 664 - protein, 9 aa, Artificial Sequence
  Synthetic
YMSALNHTK

SEQ ID NO: 665 - protein, 9 aa, Artificial Sequence
  Synthetic
MSALNHTKK

SEQ ID NO: 666 - protein, 10 aa, Artificial Sequence
  Synthetic
MSALNHTKKW

SEQ ID NO: 667 - protein, 9 aa, Artificial Sequence
  Synthetic
SALNHTKKW

SEQ ID NO: 668 - protein, 9 aa, Artificial Sequence
  Synthetic
WKYPQVNGL

SEQ ID NO: 669 - protein, 10 aa, Artificial Sequence
  Synthetic
YPQVNGLTSI

SEQ ID NO: 670 - protein, 9 aa, Artificial Sequence
  Synthetic
YLATALLTL

SEQ ID NO: 671 - protein, 12 aa, Artificial Sequence
  Synthetic
YYRARAGEAANF

SEQ ID NO: 672 - protein, 9 aa, Artificial Sequence
  Synthetic
ARAGEAANF

SEQ ID NO: 673 - protein, 9 aa, Artificial Sequence
  Synthetic
GEAANFCAL

SEQ ID NO: 674 - protein, 14 aa, Artificial Sequence
  Synthetic
GELGDVRETMSYLF

SEQ ID NO: 675 - protein, 10 aa, Artificial Sequence
  Synthetic
LGDVRETMSY

SEQ ID NO: 676 - protein, 9 aa, Artificial Sequence
  Synthetic
VRETMSYLF

SEQ ID NO: 677 - protein, 9 aa, Artificial Sequence
  Synthetic
VMYMGTLSY

SEQ ID NO: 678 - protein, 9 aa, Artificial Sequence
  Synthetic
SAPPAQYEL

SEQ ID NO: 679 - protein, 11 aa, Artificial Sequence
  Synthetic
FTCASEYTGNY

SEQ ID NO: 680 - protein, 12 aa, Artificial Sequence
  Synthetic
SEYTGNYQCGHY

SEQ ID NO: 681 - protein, 10 aa, Artificial Sequence
  Synthetic
YTGNYQCGHY

SEQ ID NO: 682 - protein, 12 aa, Artificial Sequence
  Synthetic
SEYKGPITDVFY

SEQ ID NO: 683 - protein, 11 aa, Artificial Sequence
  Synthetic
ITDVFYKENSY

SEQ ID NO: 684 - protein, 9 aa, Artificial Sequence
  Synthetic
DVFYKENSY

SEQ ID NO: 685 - protein, 14 aa, Artificial Sequence
  Synthetic
KENSYTTTIKPVTY

SEQ ID NO: 686 - protein, 10 aa, Artificial Sequence
  Synthetic
YTTTIKPVTY

SEQ ID NO: 687 - protein, 11 aa, Artificial Sequence
  Synthetic
CTEIDPKLDNY

SEQ ID NO: 688 - protein, 11 aa, Artificial Sequence
  Synthetic
TEIDPKLDNYY

SEQ ID NO: 689 - protein, 9 aa, Artificial Sequence
  Synthetic
EIDPKLDNY

SEQ ID NO: 690 - protein, 9 aa, Artificial Sequence
  Synthetic
NYYKKDNSY

SEQ ID NO: 691 - protein, 8 aa, Artificial Sequence
  Synthetic
YYKKDNSY

SEQ ID NO: 692 - protein, 9 aa, Artificial Sequence
  Synthetic
YYKKDNSYF

SEQ ID NO: 693 - protein, 14 aa, Artificial Sequence
  Synthetic
FTEQPIDLVPNQPY

SEQ ID NO: 694 - protein, 9 aa, Artificial Sequence
  Synthetic
ASFDNFKFV

SEQ ID NO: 695 - protein, 9 aa, Artificial Sequence
  Synthetic
KFADDLNQL

SEQ ID NO: 696 - protein, 11 aa, Artificial Sequence
  Synthetic
FADDLNQLTGY

SEQ ID NO: 697 - protein, 9 aa, Artificial Sequence
  Synthetic
ASRELKVTF

SEQ ID NO: 698 - protein, 10 aa, Artificial Sequence
  Synthetic
DVVAIDYKHY

SEQ ID NO: 699 - protein, 9 aa, Artificial Sequence
  Synthetic
VVAIDYKHY

SEQ ID NO: 700 - protein, 9 aa, Artificial Sequence
  Synthetic
DYKHYTPSF

SEQ ID NO: 701 - protein, 11 aa, Artificial Sequence
  Synthetic
KLLHKPIVWHV

SEQ ID NO: 702 - protein, 9 aa, Artificial Sequence
  Synthetic
LHKPIVWHV

SEQ ID NO: 703 - protein, 10 aa, Artificial Sequence
  Synthetic
NKATYKPNTW

SEQ ID NO: 704 - protein, 12 aa, Artificial Sequence
  Synthetic
KPVETSNSFDVL

SEQ ID NO: 705 - protein, 10 aa, Artificial Sequence
  Synthetic
SEDAQGMDNL

SEQ ID NO: 706 - protein, 9 aa, Artificial Sequence
  Synthetic
EEVVENPTI

SEQ ID NO: 707 - protein, 9 aa, Artificial Sequence
  Synthetic
TEVVGDIIL

SEQ ID NO: 708 - protein, 14 aa, Artificial Sequence
  Synthetic
ITEEVGHTDLMAAY

SEQ ID NO: 709 - protein, 12 aa, Artificial Sequence
  Synthetic
EEVGHTDLMAAY

SEQ ID NO: 710 - protein, 11 aa, Artificial Sequence
  Synthetic
EVGHTDLMAAY

SEQ ID NO: 711 - protein, 10 aa, Artificial Sequence
  Synthetic
AYVDNSSLTI

SEQ ID NO: 712 - protein, 9 aa, Artificial Sequence
  Synthetic
LTIKKPNEL

SEQ ID NO: 713 - protein, 9 aa, Artificial Sequence
  Synthetic
KPNELSRVL

SEQ ID NO: 714 - protein, 9 aa, Artificial Sequence
  Synthetic
NELSRVLGL

SEQ ID NO: 715 - protein, 9 aa, Artificial Sequence
  Synthetic
SRVLGLKTL

SEQ ID NO: 716 - protein, 10 aa, Artificial Sequence
  Synthetic
SVPWDTIANY

SEQ ID NO: 717 - protein, 10 aa, Artificial Sequence
  Synthetic
DTIANYAKPF

SEQ ID NO: 718 - protein, 9 aa, Artificial Sequence
  Synthetic
YAKPFLNKV

SEQ ID NO: 719 - protein, 9 aa, Artificial Sequence
  Synthetic
NYMPYFFTL

SEQ ID NO: 720 - protein, 8 aa, Artificial Sequence
  Synthetic
MPYFFTLL

SEQ ID NO: 721 - protein, 9 aa, Artificial Sequence
  Synthetic
RIKASMPTT

SEQ ID NO: 722 - protein, 9 aa, Artificial Sequence
  Synthetic
KASMPTTIA

SEQ ID NO: 723 - protein, 9 aa, Artificial Sequence
  Synthetic
ASMPTTIAK

SEQ ID NO: 724 - protein, 10 aa, Artificial Sequence
  Synthetic
MPTTIAKNTV

SEQ ID NO: 725 - protein, 9 aa, Artificial Sequence
  Synthetic
TTIAKNTVK

SEQ ID NO: 726 - protein, 9 aa, Artificial Sequence
  Synthetic
NTVKSVGKF

SEQ ID NO: 727 - protein, 10 aa, Artificial Sequence
  Synthetic
KFCLEASFNY

SEQ ID NO: 728 - protein, 9 aa, Artificial Sequence
  Synthetic
CLEASFNYL

SEQ ID NO: 729 - protein, 13 aa, Artificial Sequence
  Synthetic
ASFNYLKSPNFSK

SEQ ID NO: 730 - protein, 9 aa, Artificial Sequence
  Synthetic
KLINIIIWF

SEQ ID NO: 731 - protein, 9 aa, Artificial Sequence
  Synthetic
SLIYSTAAL

SEQ ID NO: 732 - protein, 9 aa, Artificial Sequence
  Synthetic
STAALGVLM

SEQ ID NO: 733 - protein, 9 aa, Artificial Sequence
  Synthetic
MSNLGMPSY

SEQ ID NO: 734 - protein, 9 aa, Artificial Sequence
  Synthetic
EGYLNSTNV

SEQ ID NO: 735 - protein, 10 aa, Artificial Sequence
  Synthetic
NSTNVTIATY

SEQ ID NO: 736 - protein, 9 aa, Artificial Sequence
  Synthetic
STNVTIATY

SEQ ID NO: 737 - protein, 11 aa, Artificial Sequence
  Synthetic
SLDTYPSLETI

SEQ ID NO: 738 - protein, 10 aa, Artificial Sequence
  Synthetic
ETIQITISSF

SEQ ID NO: 739 - protein, 9 aa, Artificial Sequence
  Synthetic
IQITISSFK

SEQ ID NO: 740 - protein, 10 aa, Artificial Sequence
  Synthetic
LTAFGLVAEW

SEQ ID NO: 741 - protein, 9 aa, Artificial Sequence
  Synthetic
LVAEWFLAY

SEQ ID NO: 742 - protein, 9 aa, Artificial Sequence
  Synthetic
AEWFLAYIL

SEQ ID NO: 743 - protein, 10 aa, Artificial Sequence
  Synthetic
AEWFLAYILF

SEQ ID NO: 744 - protein, 8 aa, Artificial Sequence
  Synthetic
AYILFTRF

SEQ ID NO: 745 - protein, 11 aa, Artificial Sequence
  Synthetic
AYILFTRFFYV

SEQ ID NO: 746 - protein, 9 aa, Artificial Sequence
  Synthetic
AYILFTRFF

SEQ ID NO: 747 - protein, 9 aa, Artificial Sequence
  Synthetic
ILFTRFFYV

SEQ ID NO: 748 - protein, 9 aa, Artificial Sequence
  Synthetic
AVHFISNSW

SEQ ID NO: 749 - protein, 10 aa, Artificial Sequence
  Synthetic
HFISNSWLMW

SEQ ID NO: 750 - protein, 9 aa, Artificial Sequence
  Synthetic
WLMWLIINL

SEQ ID NO: 751 - protein, 10 aa, Artificial Sequence
  Synthetic
LVQMAPISAM

SEQ ID NO: 752 - protein, 9 aa, Artificial Sequence
  Synthetic
SAMVRMYIF

SEQ ID NO: 753 - protein, 10 aa, Artificial Sequence
  Synthetic
RMYIFFASFY

SEQ ID NO: 754 - protein, 9 aa, Artificial Sequence
  Synthetic
YIFFASFYY

SEQ ID NO: 755 - protein, 9 aa, Artificial Sequence
  Synthetic
SFYYVWKSY

SEQ ID NO: 756 - protein, 9 aa, Artificial Sequence
  Synthetic
FYYVWKSYV

SEQ ID NO: 757 - protein, 8 aa, Artificial Sequence
  Synthetic
FYYVWKSY

SEQ ID NO: 758 - protein, 10 aa, Artificial Sequence
  Synthetic
YVYANGGKGF

SEQ ID NO: 759 - protein, 9 aa, Artificial Sequence
  Synthetic
DTFCAGSTF

SEQ ID NO: 760 - protein, 10 aa, Artificial Sequence
  Synthetic
EVARDLSLQF

SEQ ID NO: 761 - protein, 9 aa, Artificial Sequence
  Synthetic
VARDLSLQF

SEQ ID NO: 762 - protein, 11 aa, Artificial Sequence
  Synthetic
VTVKNGSIHLY

SEQ ID NO: 763 - protein, 10 aa, Artificial Sequence
  Synthetic
TVKNGSIHLY

SEQ ID NO: 764 - protein, 9 aa, Artificial Sequence
  Synthetic
VKNGSIHLY

SEQ ID NO: 765 - protein, 10 aa, Artificial Sequence
  Synthetic
YFDKAGQKTY

SEQ ID NO: 766 - protein, 10 aa, Artificial Sequence
  Synthetic
TYERHSLSHF

SEQ ID NO: 767 - protein, 9 aa, Artificial Sequence
  Synthetic
YERHSLSHF

SEQ ID NO: 768 - protein, 9 aa, Artificial Sequence
  Synthetic
ERHSLSHFV

SEQ ID NO: 769 - protein, 11 aa, Artificial Sequence
  Synthetic
EESSAKSASVY

SEQ ID NO: 770 - protein, 9 aa, Artificial Sequence
  Synthetic
SSAKSASVY

SEQ ID NO: 771 - protein, 9 aa, Artificial Sequence
  Synthetic
SAKSASVYY

SEQ ID NO: 772 - protein, 10 aa, Artificial Sequence
  Synthetic
QLMCQPILLL

SEQ ID NO: 773 - protein, 9 aa, Artificial Sequence
  Synthetic
DSAEVAVKM

SEQ ID NO: 774 - protein, 8 aa, Artificial Sequence
  Synthetic
AEVAVKMF

SEQ ID NO: 775 - protein, 10 aa, Artificial Sequence
  Synthetic
EVAVKMFDAY

SEQ ID NO: 776 - protein, 10 aa, Artificial Sequence
  Synthetic
KMFDAYVNTF

SEQ ID NO: 777 - protein, 9 aa, Artificial Sequence
  Synthetic
MFDAYVNTF

SEQ ID NO: 778 - protein, 10 aa, Artificial Sequence
  Synthetic
AYVNTFSSTF

SEQ ID NO: 779 - protein, 9 aa, Artificial Sequence
  Synthetic
YVNTFSSTF

SEQ ID NO: 780 - protein, 12 aa, Artificial Sequence
  Synthetic
SSTFNVPMEKLK

SEQ ID NO: 781 - protein, 9 aa, Artificial Sequence
  Synthetic
STFNVPMEK

SEQ ID NO: 782 - protein, 9 aa, Artificial Sequence
  Synthetic
VPMEKLKTL

SEQ ID NO: 783 - protein, 9 aa, Artificial Sequence
  Synthetic
AEAELAKNV

SEQ ID NO: 784 - protein, 9 aa, Artificial Sequence
  Synthetic
AELAKNVSL

SEQ ID NO: 785 - protein, 13 aa, Artificial Sequence
  Synthetic
AELAKNVSLDNVL

SEQ ID NO: 786 - protein, 9 aa, Artificial Sequence
  Synthetic
SLDNVLSTF

SEQ ID NO: 787 - protein, 10 aa, Artificial Sequence
  Synthetic
TFISAARQGF

SEQ ID NO: 788 - protein, 14 aa, Artificial Sequence
  Synthetic
QSDIEVTGDSCNNY

SEQ ID NO: 789 - protein, 14 aa, Artificial Sequence
  Synthetic
EVTGDSCNNYMLTY

SEQ ID NO: 790 - protein, 10 aa, Artificial Sequence
  Synthetic
DSCNNYMLTY

SEQ ID NO: 791 - protein, 9 aa, Artificial Sequence
  Synthetic
VENMTPRDL

SEQ ID NO: 792 - protein, 9 aa, Artificial Sequence
  Synthetic
TPRDLGACI

SEQ ID NO: 793 - protein, 9 aa, Artificial Sequence
  Synthetic
VAKSHNIAL

SEQ ID NO: 794 - protein, 10 aa, Artificial Sequence
  Synthetic
AKSHNIALIW

SEQ ID NO: 795 - protein, 8 aa, Artificial Sequence
  Synthetic
NVKDFMSL

SEQ ID NO: 796 - protein, 9 aa, Artificial Sequence
  Synthetic
QVVNVVTTK

SEQ ID NO: 797 - protein, 9 aa, Artificial Sequence
  Synthetic
VVTTKIALK

SEQ ID NO: 798 - protein, 10 aa, Artificial Sequence
  Synthetic
KQLIKVTLVF

SEQ ID NO: 799 - protein, 9 aa, Artificial Sequence
  Synthetic
FYLITPVHV

SEQ ID NO: 800 - protein, 8 aa, Artificial Sequence
  Synthetic
YLITPVHV

SEQ ID NO: 801 - protein, 9 aa, Artificial Sequence
  Synthetic
YLITPVHVM

SEQ ID NO: 802 - protein, 11 aa, Artificial Sequence
  Synthetic
HTDFSSEIIGY

SEQ ID NO: 803 - protein, 9 aa, Artificial Sequence
  Synthetic
SEIIGYKAI

SEQ ID NO: 804 - protein, 9 aa, Artificial Sequence
  Synthetic
IAAVITREV

SEQ ID NO: 805 - protein, 9 aa, Artificial Sequence
  Synthetic
FVVPGLPGT

SEQ ID NO: 806 - protein, 9 aa, Artificial Sequence
  Synthetic
VPGLPGTIL

SEQ ID NO: 807 - protein, 10 aa, Artificial Sequence
  Synthetic
RTTNGDFLHF

SEQ ID NO: 808 - protein, 9 aa, Artificial Sequence
  Synthetic
FLPRVFSAV

SEQ ID NO: 809 - protein, 8 aa, Artificial Sequence
  Synthetic
LPRVFSAV

SEQ ID NO: 810 - protein, 9 aa, Artificial Sequence
  Synthetic
FSAVGNICY

SEQ ID NO: 811 - protein, 8 aa, Artificial Sequence
  Synthetic
TPSKLIEY

SEQ ID NO: 812 - protein, 9 aa, Artificial Sequence
  Synthetic
VLAAECTIF

SEQ ID NO: 813 - protein, 9 aa, Artificial Sequence
  Synthetic
DASGKPVPY

SEQ ID NO: 814 - protein, 10 aa, Artificial Sequence
  Synthetic
TNVLEGSVAY

SEQ ID NO: 815 - protein, 9 aa, Artificial Sequence
  Synthetic
GSVAYESLR

SEQ ID NO: 816 - protein, 10 aa, Artificial Sequence
  Synthetic
SLRPDTRYVL

SEQ ID NO: 817 - protein, 8 aa, Artificial Sequence
  Synthetic
LRPDTRYV

SEQ ID NO: 818 - protein, 8 aa, Artificial Sequence
  Synthetic
RPDTRYVL

SEQ ID NO: 819 - protein, 9 aa, Artificial Sequence
  Synthetic
RPDTRYVLM

SEQ ID NO: 820 - protein, 9 aa, Artificial Sequence
  Synthetic
SIIQFPNTY

SEQ ID NO: 821 - protein, 9 aa, Artificial Sequence
  Synthetic
WVLNNDYYR

SEQ ID NO: 822 - protein, 8 aa, Artificial Sequence
  Synthetic
YRSLPGVF

SEQ ID NO: 823 - protein, 9 aa, Artificial Sequence
  Synthetic
SLPGVFCGV

SEQ ID NO: 824 - protein, 9 aa, Artificial Sequence
  Synthetic
DAVNLLTNM

SEQ ID NO: 825 - protein, 9 aa, Artificial Sequence
  Synthetic
IVAGGIVAI

SEQ ID NO: 826 - protein, 9 aa, Artificial Sequence
  Synthetic
LAYYFMRFR

SEQ ID NO: 827 - protein, 9 aa, Artificial Sequence
  Synthetic
YFMRFRRAF

SEQ ID NO: 828 - protein, 10 aa, Artificial Sequence
  Synthetic
FGEYSHVVAF

SEQ ID NO: 829 - protein, 9 aa, Artificial Sequence
  Synthetic
SFLPGVYSV

SEQ ID NO: 830 - protein, 8 aa, Artificial Sequence
  Synthetic
FLPGVYSV

SEQ ID NO: 831 - protein, 8 aa, Artificial Sequence
  Synthetic
LPGVYSVI

SEQ ID NO: 832 - protein, 9 aa, Artificial Sequence
  Synthetic
IYLYLTFYL

SEQ ID NO: 833 - protein, 11 aa, Artificial Sequence
  Synthetic
TFYLTNDVSFL

SEQ ID NO: 834 - protein, 10 aa, Artificial Sequence
  Synthetic
YLTNDVSFLA

SEQ ID NO: 835 - protein, 9 aa, Artificial Sequence
  Synthetic
FLAHIQWMV

SEQ ID NO: 836 - protein, 9 aa, Artificial Sequence
  Synthetic
MFTPLVPFW

SEQ ID NO: 837 - protein, 9 aa, Artificial Sequence
  Synthetic
VPFWITIAY

SEQ ID NO: 838 - protein, 8 aa, Artificial Sequence
  Synthetic
ISTKHFYW

SEQ ID NO: 839 - protein, 9 aa, Artificial Sequence
  Synthetic
WFFSNYLKR

SEQ ID NO: 840 - protein, 8 aa, Artificial Sequence
  Synthetic
YLKRRVVF

SEQ ID NO: 841 - protein, 9 aa, Artificial Sequence
  Synthetic
FLLNKEMYL

SEQ ID NO: 842 - protein, 9 aa, Artificial Sequence
  Synthetic
DVLLPLTQY

SEQ ID NO: 843 - protein, 9 aa, Artificial Sequence
  Synthetic
LPLTQYNRY

SEQ ID NO: 844 - protein, 9 aa, Artificial Sequence
  Synthetic
GAMDTTSYR

SEQ ID NO: 845 - protein, 9 aa, Artificial Sequence
  Synthetic
SNSGSDVLY

SEQ ID NO: 846 - protein, 9 aa, Artificial Sequence
  Synthetic
LYQPPQTSI

SEQ ID NO: 847 - protein, 9 aa, Artificial Sequence
  Synthetic
AVLQSGFRK

SEQ ID NO: 848 - protein, 10 aa, Artificial Sequence
  Synthetic
TSEDMLNPNY

SEQ ID NO: 849 - protein, 9 aa, Artificial Sequence
  Synthetic
TANPKTPKY

SEQ ID NO: 850 - protein, 9 aa, Artificial Sequence
  Synthetic
NPKTPKYKF

SEQ ID NO: 851 - protein, 9 aa, Artificial Sequence
  Synthetic
TPKYKFVRI

SEQ ID NO: 852 - protein, 9 aa, Artificial Sequence
  Synthetic
VRIQPGQTF

SEQ ID NO: 853 - protein, 9 aa, Artificial Sequence
  Synthetic
IQPGQTFSV

SEQ ID NO: 854 - protein, 9 aa, Artificial Sequence
  Synthetic
QPGQTFSVL

SEQ ID NO: 855 - protein, 10 aa, Artificial Sequence
  Synthetic
SPSGVYQCAM

SEQ ID NO: 856 - protein, 9 aa, Artificial Sequence
  Synthetic
FLNGSCGSV

SEQ ID NO: 857 - protein, 11 aa, Artificial Sequence
  Synthetic
YMHHMELPTGV

SEQ ID NO: 858 - protein, 9 aa, Artificial Sequence
  Synthetic
GTDLEGNFY

SEQ ID NO: 859 - protein, 8 aa, Artificial Sequence
  Synthetic
TDLEGNFY

SEQ ID NO: 860 - protein, 9 aa, Artificial Sequence
  Synthetic
VLAWLYAAV

SEQ ID NO: 861 - protein, 9 aa, Artificial Sequence
  Synthetic
FLNRFTTTL

SEQ ID NO: 862 - protein, 9 aa, Artificial Sequence
  Synthetic
ILTSLLVLV

SEQ ID NO: 863 - protein, 9 aa, Artificial Sequence
  Synthetic
FLYENAFLP

SEQ ID NO: 864 - protein, 11 aa, Artificial Sequence
  Synthetic
FLYENAFLPFA

SEQ ID NO: 865 - protein, 10 aa, Artificial Sequence
  Synthetic
LPFAMGIIAM

SEQ ID NO: 866 - protein, 9 aa, Artificial Sequence
  Synthetic
SAFAMMFVK

SEQ ID NO: 867 - protein, 9 aa, Artificial Sequence
  Synthetic
MFVKHKHAF

SEQ ID NO: 868 - protein, 9 aa, Artificial Sequence
  Synthetic
FVKHKHAFL

SEQ ID NO: 869 - protein, 13 aa, Artificial Sequence
  Synthetic
FLCLFLLPSLATV

SEQ ID NO: 870 - protein, 10 aa, Artificial Sequence
  Synthetic
LFLLPSLATV

SEQ ID NO: 871 - protein, 10 aa, Artificial Sequence
  Synthetic
FLLPSLATVA

SEQ ID NO: 872 - protein, 9 aa, Artificial Sequence
  Synthetic
FLLPSLATV

SEQ ID NO: 873 - protein, 9 aa, Artificial Sequence
  Synthetic
VYMPASWVM

SEQ ID NO: 874 - protein, 9 aa, Artificial Sequence
  Synthetic
MPASWVMRI

SEQ ID NO: 875 - protein, 9 aa, Artificial Sequence
  Synthetic
RIMTWLDMV

SEQ ID NO: 876 - protein, 9 aa, Artificial Sequence
  Synthetic
WLDMVDTSL

SEQ ID NO: 877 - protein, 9 aa, Artificial Sequence
  Synthetic
KLKDCVMYA

SEQ ID NO: 878 - protein, 10 aa, Artificial Sequence
  Synthetic
VMYASAVVLL

SEQ ID NO: 879 - protein, 9 aa, Artificial Sequence
  Synthetic
MYASAVVLL

SEQ ID NO: 880 - protein, 9 aa, Artificial Sequence
  Synthetic
YASAVVLLI

SEQ ID NO: 881 - protein, 9 aa, Artificial Sequence
  Synthetic
TLMNVLTLV

SEQ ID NO: 882 - protein, 9 aa, Artificial Sequence
  Synthetic
SMWALIISV

SEQ ID NO: 883 - protein, 11 aa, Artificial Sequence
  Synthetic
NYSGVVTTVMF

SEQ ID NO: 884 - protein, 9 aa, Artificial Sequence
  Synthetic
FLARGIVFM

SEQ ID NO: 885 - protein, 9 aa, Artificial Sequence
  Synthetic
IFFITGNTL

SEQ ID NO: 886 - protein, 8 aa, Artificial Sequence
  Synthetic
NRYFRLTL

SEQ ID NO: 887 - protein, 11 aa, Artificial Sequence
  Synthetic
TLGVYDYLVST

SEQ ID NO: 888 - protein, 9 aa, Artificial Sequence
  Synthetic
GVYDYLVST

SEQ ID NO: 889 - protein, 10 aa, Artificial Sequence
  Synthetic
YDYLVSTQEF

SEQ ID NO: 890 - protein, 9 aa, Artificial Sequence
  Synthetic
FRYMNSQGL

SEQ ID NO: 891 - protein, 9 aa, Artificial Sequence
  Synthetic
GLLPPKNSI

SEQ ID NO: 892 - protein, 9 aa, Artificial Sequence
  Synthetic
KLNIKLLGV

SEQ ID NO: 893 - protein, 9 aa, Artificial Sequence
  Synthetic
KLWAQCVQL

SEQ ID NO: 894 - protein, 9 aa, Artificial Sequence
  Synthetic
EAFEKMVSL

SEQ ID NO: 895 - protein, 9 aa, Artificial Sequence
  Synthetic
SLLSVLLSM

SEQ ID NO: 896 - protein, 9 aa, Artificial Sequence
  Synthetic
SEFSSLPSY

SEQ ID NO: 897 - protein, 8 aa, Artificial Sequence
  Synthetic
LKKLKKSL

SEQ ID NO: 898 - protein, 11 aa, Artificial Sequence
  Synthetic
KMADQAMTQMY

SEQ ID NO: 899 - protein, 11 aa, Artificial Sequence
  Synthetic
LMVVIPDYNTY

SEQ ID NO: 900 - protein, 11 aa, Artificial Sequence
  Synthetic
TYKNTCDGTTF

SEQ ID NO: 901 - protein, 10 aa, Artificial Sequence
  Synthetic
NTCDGTTFTY

SEQ ID NO: 902 - protein, 9 aa, Artificial Sequence
  Synthetic
TFTYASALW

SEQ ID NO: 903 - protein, 10 aa, Artificial Sequence
  Synthetic
FTYASALWEI

SEQ ID NO: 904 - protein, 10 aa, Artificial Sequence
  Synthetic
SALWEIQQVV

SEQ ID NO: 905 - protein, 8 aa, Artificial Sequence
  Synthetic
ALWEIQQV

SEQ ID NO: 906 - protein, 9 aa, Artificial Sequence
  Synthetic
ALWEIQQVV

SEQ ID NO: 907 - protein, 11 aa, Artificial Sequence
  Synthetic
SEISMDNSPNL

SEQ ID NO: 908 - protein, 9 aa, Artificial Sequence
  Synthetic
AWPLIVTAL

SEQ ID NO: 909 - protein, 9 aa, Artificial Sequence
  Synthetic
ALRANSAVK

SEQ ID NO: 910 - protein, 10 aa, Artificial Sequence
  Synthetic
CTDDNALAYY

SEQ ID NO: 911 - protein, 9 aa, Artificial Sequence
  Synthetic
CTDDNALAY

SEQ ID NO: 912 - protein, 8 aa, Artificial Sequence
  Synthetic
SDGTGTIY

SEQ ID NO: 913 - protein, 10 aa, Artificial Sequence
  Synthetic
YTELEPPCRF

SEQ ID NO: 914 - protein, 9 aa, Artificial Sequence
  Synthetic
VTDTPKGPK

SEQ ID NO: 915 - protein, 9 aa, Artificial Sequence
  Synthetic
GPKVKYLYF

SEQ ID NO: 916 - protein, 11 aa, Artificial Sequence
  Synthetic
YLYFIKGLNNL

SEQ ID NO: 917 - protein, 9 aa, Artificial Sequence
  Synthetic
YFIKGLNNL

SEQ ID NO: 918 - protein, 8 aa, Artificial Sequence
  Synthetic
VPANSTVL

SEQ ID NO: 919 - protein, 10 aa, Artificial Sequence
  Synthetic
VPANSTVLSF

SEQ ID NO: 920 - protein, 10 aa, Artificial Sequence
  Synthetic
TVLSFCAFAV

SEQ ID NO: 921 - protein, 9 aa, Artificial Sequence
  Synthetic
YLASGGQPI

SEQ ID NO: 922 - protein, 9 aa, Artificial Sequence
  Synthetic
DLKGKYVQI

SEQ ID NO: 923 - protein, 9 aa, Artificial Sequence
  Synthetic
VVYRAFDIY

SEQ ID NO: 924 - protein, 11 aa, Artificial Sequence
  Synthetic
FDIYNDKVAGF

SEQ ID NO: 925 - protein, 9 aa, Artificial Sequence
  Synthetic
KVAGFAKFL

SEQ ID NO: 926 - protein, 10 aa, Artificial Sequence
  Synthetic
KVAGFAKFLK

SEQ ID NO: 927 - protein, 9 aa, Artificial Sequence
  Synthetic
NLIDSYFVV

SEQ ID NO: 928 - protein, 9 aa, Artificial Sequence
  Synthetic
YFVVKRHTF

SEQ ID NO: 929 - protein, 9 aa, Artificial Sequence
  Synthetic
VPHISRQRL

SEQ ID NO: 930 - protein, 10 aa, Artificial Sequence
  Synthetic
YTMADLVYAL

SEQ ID NO: 931 - protein, 9 aa, Artificial Sequence
  Synthetic
TMADLVYAL

SEQ ID NO: 932 - protein, 9 aa, Artificial Sequence
  Synthetic
TLKEILVTY

SEQ ID NO: 933 - protein, 10 aa, Artificial Sequence
  Synthetic
FVENPDILRV

SEQ ID NO: 934 - protein, 9 aa, Artificial Sequence
  Synthetic
VENPDILRV

SEQ ID NO: 935 - protein, 10 aa, Artificial Sequence
  Synthetic
VENPDILRVY

SEQ ID NO: 936 - protein, 9 aa, Artificial Sequence
  Synthetic
VRQALLKTV

SEQ ID NO: 937 - protein, 9 aa, Artificial Sequence
  Synthetic
DAMRNAGIV

SEQ ID NO: 938 - protein, 9 aa, Artificial Sequence
  Synthetic
SLLMPILTL

SEQ ID NO: 939 - protein, 9 aa, Artificial Sequence
  Synthetic
LLMPILTLT

SEQ ID NO: 940 - protein, 13 aa, Artificial Sequence
  Synthetic
AESHVDTDLTKPY

SEQ ID NO: 941 - protein, 10 aa, Artificial Sequence
  Synthetic
HVDTDLTKPY

SEQ ID NO: 942 - protein, 9 aa, Artificial Sequence
  Synthetic
KPYIKWDLL

SEQ ID NO: 943 - protein, 9 aa, Artificial Sequence
  Synthetic
KLFDRYFKY

SEQ ID NO: 944 - protein, 10 aa, Artificial Sequence
  Synthetic
RYFKYWDQTY

SEQ ID NO: 945 - protein, 9 aa, Artificial Sequence
  Synthetic
ILHCANFNV

SEQ ID NO: 946 - protein, 9 aa, Artificial Sequence
  Synthetic
STVFPPTSF

SEQ ID NO: 947 - protein, 9 aa, Artificial Sequence
  Synthetic
FPPTSFGPL

SEQ ID NO: 948 - protein, 9 aa, Artificial Sequence
  Synthetic
TSFGPLVRK

SEQ ID NO: 949 - protein, 9 aa, Artificial Sequence
  Synthetic
SFGPLVRKI

SEQ ID NO: 950 - protein, 10 aa, Artificial Sequence
  Synthetic
KIFVDGVPFV

SEQ ID NO: 951 - protein, 9 aa, Artificial Sequence
  Synthetic
FVDGVPFVV

SEQ ID NO: 952 - protein, 10 aa, Artificial Sequence
  Synthetic
FVVSTGYHFR

SEQ ID NO: 953 - protein, 9 aa, Artificial Sequence
  Synthetic
VVSTGYHFR

SEQ ID NO: 954 - protein, 9 aa, Artificial Sequence
  Synthetic
NLHSSRLSF

SEQ ID NO: 955 - protein, 10 aa, Artificial Sequence
  Synthetic
QTVKPGNFNK

SEQ ID NO: 956 - protein, 13 aa, Artificial Sequence
  Synthetic
DFYDFAVSKGFFK

SEQ ID NO: 957 - protein, 9 aa, Artificial Sequence
  Synthetic
FAVSKGFFK

SEQ ID NO: 958 - protein, 10 aa, Artificial Sequence
  Synthetic
AAISDYDYYR

SEQ ID NO: 959 - protein, 9 aa, Artificial Sequence
  Synthetic
AAISDYDYY

SEQ ID NO: 960 - protein, 9 aa, Artificial Sequence
  Synthetic
AISDYDYYR

SEQ ID NO: 961 - protein, 9 aa, Artificial Sequence
  Synthetic
ISDYDYYRY

SEQ ID NO: 962 - protein, 9 aa, Artificial Sequence
  Synthetic
YRYNLPTMC

SEQ ID NO: 963 - protein, 8 aa, Artificial Sequence
  Synthetic
YRYNLPTM

SEQ ID NO: 964 - protein, 9 aa, Artificial Sequence
  Synthetic
RQLLFVVEV

SEQ ID NO: 965 - protein, 9 aa, Artificial Sequence
  Synthetic
FVVEVVDKY

SEQ ID NO: 966 - protein, 9 aa, Artificial Sequence
  Synthetic
VVDKYFDCY

SEQ ID NO: 967 - protein, 10 aa, Artificial Sequence
  Synthetic
KSAGFPFNKW

SEQ ID NO: 968 - protein, 9 aa, Artificial Sequence
  Synthetic
KSAGFPFNK

SEQ ID NO: 969 - protein, 10 aa, Artificial Sequence
  Synthetic
ARLYYDSMSY

SEQ ID NO: 970 - protein, 9 aa, Artificial Sequence
  Synthetic
RLYYDSMSY

SEQ ID NO: 971 - protein, 9 aa, Artificial Sequence
  Synthetic
FAYTKRNVI

SEQ ID NO: 972 - protein, 9 aa, Artificial Sequence
  Synthetic
NVIPTITQM

SEQ ID NO: 973 - protein, 9 aa, Artificial Sequence
  Synthetic
IPTITQMNL

SEQ ID NO: 974 - protein, 9 aa, Artificial Sequence
  Synthetic
TITQMNLKY

SEQ ID NO: 975 - protein, 10 aa, Artificial Sequence
  Synthetic
YAISAKNRAR

SEQ ID NO: 976 - protein, 9 aa, Artificial Sequence
  Synthetic
SAKNRARTV

SEQ ID NO: 977 - protein, 9 aa, Artificial Sequence
  Synthetic
SICSTMTNR

SEQ ID NO: 978 - protein, 9 aa, Artificial Sequence
  Synthetic
IAATRGATV

SEQ ID NO: 979 - protein, 9 aa, Artificial Sequence
  Synthetic
ATVVIGTSK

SEQ ID NO: 980 - protein, 12 aa, Artificial Sequence
  Synthetic
YSDVENPHLMGW

SEQ ID NO: 981 - protein, 10 aa, Artificial Sequence
  Synthetic
VENPHLMGWD

SEQ ID NO: 982 - protein, 11 aa, Artificial Sequence
  Synthetic
MPNMLRIMASL

SEQ ID NO: 983 - protein, 9 aa, Artificial Sequence
  Synthetic
NMLRIMASL

SEQ ID NO: 984 - protein, 8 aa, Artificial Sequence
  Synthetic
MLRIMASL

SEQ ID NO: 985 - protein, 9 aa, Artificial Sequence
  Synthetic
LRIMASLVL

SEQ ID NO: 986 - protein, 9 aa, Artificial Sequence
  Synthetic
IMASLVLAR

SEQ ID NO: 987 - protein, 9 aa, Artificial Sequence
  Synthetic
MASLVLARK

SEQ ID NO: 988 - protein, 9 aa, Artificial Sequence
  Synthetic
RLANECAQV

SEQ ID NO: 989 - protein, 10 aa, Artificial Sequence
  Synthetic
MVMCGGSLYV

SEQ ID NO: 990 - protein, 10 aa, Artificial Sequence
  Synthetic
TSSGDATTAY

SEQ ID NO: 991 - protein, 9 aa, Artificial Sequence
  Synthetic
VRNLQHRLY

SEQ ID NO: 992 - protein, 9 aa, Artificial Sequence
  Synthetic
DTDFVNEFY

SEQ ID NO: 993 - protein, 10 aa, Artificial Sequence
  Synthetic
FVNEFYAYLR

SEQ ID NO: 994 - protein, 9 aa, Artificial Sequence
  Synthetic
FVNEFYAYL

SEQ ID NO: 995 - protein, 9 aa, Artificial Sequence
  Synthetic
FYAYLRKHF

SEQ ID NO: 996 - protein, 8 aa, Artificial Sequence
  Synthetic
YAYLRKHF

SEQ ID NO: 997 - protein, 9 aa, Artificial Sequence
  Synthetic
LRKHFSMMI

SEQ ID NO: 998 - protein, 13 aa, Artificial Sequence
  Synthetic
LSDDAVVCFNSTY

SEQ ID NO: 999 - protein, 9 aa, Artificial Sequence
  Synthetic
LYYQNNVFM

SEQ ID NO: 1000 - protein, 12 aa, Artificial Sequence
  Synthetic
TETDLTKGPHEF

SEQ ID NO: 1001 - protein, 10 aa, Artificial Sequence
  Synthetic
LVKQGDDYVY

SEQ ID NO: 1002 - protein, 9 aa, Artificial Sequence
  Synthetic
KQGDDYVYL

SEQ ID NO: 1003 - protein, 13 aa, Artificial Sequence
  Synthetic
DYVYLPYPDPSRI

SEQ ID NO: 1004 - protein, 11 aa, Artificial Sequence
  Synthetic
VYLPYPDPSRI

SEQ ID NO: 1005 - protein, 10 aa, Artificial Sequence
  Synthetic
YLPYPDPSRI

SEQ ID NO: 1006 - protein, 11 aa, Artificial Sequence
  Synthetic
YLPYPDPSRIL

SEQ ID NO: 1007 - protein, 10 aa, Artificial Sequence
  Synthetic
LPYPDPSRIL

SEQ ID NO: 1008 - protein, 9 aa, Artificial Sequence
  Synthetic
RILGAGCFV

SEQ ID NO: 1009 - protein, 9 aa, Artificial Sequence
  Synthetic
LMIERFVSL

SEQ ID NO: 1010 - protein, 10 aa, Artificial Sequence
  Synthetic
QEYADVFHLY

SEQ ID NO: 1011 - protein, 9 aa, Artificial Sequence
  Synthetic
YADVFHLYL

SEQ ID NO: 1012 - protein, 9 aa, Artificial Sequence
  Synthetic
LYLQYIRKL

SEQ ID NO: 1013 - protein, 10 aa, Artificial Sequence
  Synthetic
LTNDNTSRYW

SEQ ID NO: 1014 - protein, 11 aa, Artificial Sequence
  Synthetic
NTSRYWEPEFY

SEQ ID NO: 1015 - protein, 8 aa, Artificial Sequence
  Synthetic
SRYWEPEF

SEQ ID NO: 1016 - protein, 9 aa, Artificial Sequence
  Synthetic
WEPEFYEAM

SEQ ID NO: 1017 - protein, 9 aa, Artificial Sequence
  Synthetic
AMYTPHTVL

SEQ ID NO: 1018 - protein, 9 aa, Artificial Sequence
  Synthetic
TPHTVLQAV

SEQ ID NO: 1019 - protein, 9 aa, Artificial Sequence
  Synthetic
VLQAVGACV

SEQ ID NO: 1020 - protein, 9 aa, Artificial Sequence
  Synthetic
LVLSVNPYV

SEQ ID NO: 1021 - protein, 10 aa, Artificial Sequence
  Synthetic
QLYLGGMSYY

SEQ ID NO: 1022 - protein, 8 aa, Artificial Sequence
  Synthetic
KPPISFPL

SEQ ID NO: 1023 - protein, 9 aa, Artificial Sequence
  Synthetic
KLFAAETLK

SEQ ID NO: 1024 - protein, 9 aa, Artificial Sequence
  Synthetic
KLSYGIATV

SEQ ID NO: 1025 - protein, 10 aa, Artificial Sequence
  Synthetic
VVYRGTTTYK

SEQ ID NO: 1026 - protein, 9 aa, Artificial Sequence
  Synthetic
VVYRGTTTY

SEQ ID NO: 1027 - protein, 10 aa, Artificial Sequence
  Synthetic
VYRGTTTYKL

SEQ ID NO: 1028 - protein, 9 aa, Artificial Sequence
  Synthetic
YRGTTTYKL

SEQ ID NO: 1029 - protein, 9 aa, Artificial Sequence
  Synthetic
KLNVGDYFV

SEQ ID NO: 1030 - protein, 11 aa, Artificial Sequence
  Synthetic
APTLVPQEHYV

SEQ ID NO: 1031 - protein, 9 aa, Artificial Sequence
  Synthetic
TLVPQEHYV

SEQ ID NO: 1032 - protein, 9 aa, Artificial Sequence
  Synthetic
VPQEHYVRI

SEQ ID NO: 1033 - protein, 9 aa, Artificial Sequence
  Synthetic
SSNVANYQK

SEQ ID NO: 1034 - protein, 9 aa, Artificial Sequence
  Synthetic
YQKVGMQKY

SEQ ID NO: 1035 - protein, 9 aa, Artificial Sequence
  Synthetic
FAIGLALYY

SEQ ID NO: 1036 - protein, 9 aa, Artificial Sequence
  Synthetic
YYPSARIVY

SEQ ID NO: 1037 - protein, 9 aa, Artificial Sequence
  Synthetic
IPARARVEC

SEQ ID NO: 1038 - protein, 10 aa, Artificial Sequence
  Synthetic
IPARARVECF

SEQ ID NO: 1039 - protein, 9 aa, Artificial Sequence
  Synthetic
YVFCTVNAL

SEQ ID NO: 1040 - protein, 9 aa, Artificial Sequence
  Synthetic
VVNARLRAK

SEQ ID NO: 1041 - protein, 9 aa, Artificial Sequence
  Synthetic
VYIGDPAQL

SEQ ID NO: 1042 - protein, 9 aa, Artificial Sequence
  Synthetic
IVDTVSALV

SEQ ID NO: 1043 - protein, 10 aa, Artificial Sequence
  Synthetic
RPQIGVVREF

SEQ ID NO: 1044 - protein, 9 aa, Artificial Sequence
  Synthetic
AVASKILGL

SEQ ID NO: 1045 - protein, 9 aa, Artificial Sequence
  Synthetic
ILGLPTQTV

SEQ ID NO: 1046 - protein, 11 aa, Artificial Sequence
  Synthetic
LEIPRRNVATL

SEQ ID NO: 1047 - protein, 9 aa, Artificial Sequence
  Synthetic
IPRRNVATL

SEQ ID NO: 1048 - protein, 10 aa, Artificial Sequence
  Synthetic
EEAIRHVRAW

SEQ ID NO: 1049 - protein, 9 aa, Artificial Sequence
  Synthetic
LQLGFSTGV

SEQ ID NO: 1050 - protein, 9 aa, Artificial Sequence
  Synthetic
MYKGLPWNV

SEQ ID NO: 1051 - protein, 10 aa, Artificial Sequence
  Synthetic
KNLSDRVVFV

SEQ ID NO: 1052 - protein, 9 aa, Artificial Sequence
  Synthetic
VLWAHGFEL

SEQ ID NO: 1053 - protein, 9 aa, Artificial Sequence
  Synthetic
TYACWHHSI

SEQ ID NO: 1054 - protein, 9 aa, Artificial Sequence
  Synthetic
PFMIDVQQW

SEQ ID NO: 1055 - protein, 9 aa, Artificial Sequence
  Synthetic
AIMTRCLAV

SEQ ID NO: 1056 - protein, 10 aa, Artificial Sequence
  Synthetic
IEYPIIGDEL

SEQ ID NO: 1057 - protein, 9 aa, Artificial Sequence
  Synthetic
ALLADKFPV

SEQ ID NO: 1058 - protein, 9 aa, Artificial Sequence
  Synthetic
LLADKFPVL

SEQ ID NO: 1059 - protein, 10 aa, Artificial Sequence
  Synthetic
YKIEELFYSY

SEQ ID NO: 1060 - protein, 9 aa, Artificial Sequence
  Synthetic
KIEELFYSY

SEQ ID NO: 1061 - protein, 9 aa, Artificial Sequence
  Synthetic
SYATHSDKF

SEQ ID NO: 1062 - protein, 9 aa, Artificial Sequence
  Synthetic
FTDGVCLFW

SEQ ID NO: 1063 - protein, 9 aa, Artificial Sequence
  Synthetic
SLYVNKHAF

SEQ ID NO: 1064 - protein, 9 aa, Artificial Sequence
  Synthetic
YLDAYNMMI

SEQ ID NO: 1065 - protein, 9 aa, Artificial Sequence
  Synthetic
MMISAGFSL

SEQ ID NO: 1066 - protein, 9 aa, Artificial Sequence
  Synthetic
AGFSLWVYK

SEQ ID NO: 1067 - protein, 9 aa, Artificial Sequence
  Synthetic
KQFDTYNLW

SEQ ID NO: 1068 - protein, 10 aa, Artificial Sequence
  Synthetic
YNLWNTFTRL

SEQ ID NO: 1069 - protein, 9 aa, Artificial Sequence
  Synthetic
NLWNTFTRL

SEQ ID NO: 1070 - protein, 9 aa, Artificial Sequence
  Synthetic
NTFTRLQSL

SEQ ID NO: 1071 - protein, 9 aa, Artificial Sequence
  Synthetic
SLENVAFNV

SEQ ID NO: 1072 - protein, 9 aa, Artificial Sequence
  Synthetic
KVDGVDVEL

SEQ ID NO: 1073 - protein, 9 aa, Artificial Sequence
  Synthetic
TTLPVNVAF

SEQ ID NO: 1074 - protein, 9 aa, Artificial Sequence
  Synthetic
TICAPLTVF

SEQ ID NO: 1075 - protein, 9 aa, Artificial Sequence
  Synthetic
GRVDGQVDL

SEQ ID NO: 1076 - protein, 9 aa, Artificial Sequence
  Synthetic
KVDGVVQQL

SEQ ID NO: 1077 - protein, 9 aa, Artificial Sequence
  Synthetic
VVQQLPETY

SEQ ID NO: 1078 - protein, 10 aa, Artificial Sequence
  Synthetic
KPRSQMEIDF

SEQ ID NO: 1079 - protein, 10 aa, Artificial Sequence
  Synthetic
FIERYKLEGY

SEQ ID NO: 1080 - protein, 11 aa, Artificial Sequence
  Synthetic
FIPMDSTVKNY

SEQ ID NO: 1081 - protein, 9 aa, Artificial Sequence
  Synthetic
LLLDDFVEI

SEQ ID NO: 1082 - protein, 10 aa, Artificial Sequence
  Synthetic
LLLDDFVEII

SEQ ID NO: 1083 - protein, 9 aa, Artificial Sequence
  Synthetic
SVVSKVVKV

SEQ ID NO: 1084 - protein, 9 aa, Artificial Sequence
  Synthetic
MLWCKDGHV

SEQ ID NO: 1085 - protein, 9 aa, Artificial Sequence
  Synthetic
GVAMPNLYK

SEQ ID NO: 1086 - protein, 9 aa, Artificial Sequence
  Synthetic
VAMPNLYKM

SEQ ID NO: 1087 - protein, 9 aa, Artificial Sequence
  Synthetic
KMQRMLLEK

SEQ ID NO: 1088 - protein, 9 aa, Artificial Sequence
  Synthetic
LPKGIMMNV

SEQ ID NO: 1089 - protein, 9 aa, Artificial Sequence
  Synthetic
YLNTLTLAV

SEQ ID NO: 1090 - protein, 12 aa, Artificial Sequence
  Synthetic
GVAPGTAVLRQW

SEQ ID NO: 1091 - protein, 9 aa, Artificial Sequence
  Synthetic
TLIGDCATV

SEQ ID NO: 1092 - protein, 10 aa, Artificial Sequence
  Synthetic
CATVHTANKW

SEQ ID NO: 1093 - protein, 9 aa, Artificial Sequence
  Synthetic
KLMGHFAWW

SEQ ID NO: 1094 - protein, 11 aa, Artificial Sequence
  Synthetic
SSEAFLIGCNY

SEQ ID NO: 1095 - protein, 13 aa, Artificial Sequence
  Synthetic
REQIDGYVMHANY

SEQ ID NO: 1096 - protein, 9 aa, Artificial Sequence
  Synthetic
YVMHANYIF

SEQ ID NO: 1097 - protein, 10 aa, Artificial Sequence
  Synthetic
FWRNTNPIQL

SEQ ID NO: 1098 - protein, 9 aa, Artificial Sequence
  Synthetic
WRNTNPIQL

SEQ ID NO: 1099 - protein, 10 aa, Artificial Sequence
  Synthetic
NPIQLSSYSL

SEQ ID NO: 1100 - protein, 10 aa, Artificial Sequence
  Synthetic
SYSLFDMSKF

SEQ ID NO: 1101 - protein, 9 aa, Artificial Sequence
  Synthetic
FPLKLRGTA

SEQ ID NO: 1102 - protein, 10 aa, Artificial Sequence
  Synthetic
FPLKLRGTAV

SEQ ID NO: 1103 - protein, 9 aa, Artificial Sequence
  Synthetic
LRGTAVMSL

SEQ ID NO: 1104 - protein, 10 aa, Artificial Sequence
  Synthetic
MDLFMRIFTI

SEQ ID NO: 1105 - protein, 11 aa, Artificial Sequence
  Synthetic
RIFTIGTVTLK

SEQ ID NO: 1106 - protein, 9 aa, Artificial Sequence
  Synthetic
FTIGTVTLK

SEQ ID NO: 1107 - protein, 10 aa, Artificial Sequence
  Synthetic
FVRATATIPI

SEQ ID NO: 1108 - protein, 9 aa, Artificial Sequence
  Synthetic
ATIPIQASL

SEQ ID NO: 1109 - protein, 9 aa, Artificial Sequence
  Synthetic
IPIQASLPF

SEQ ID NO: 1110 - protein, 8 aa, Artificial Sequence
  Synthetic
LPFGWLIV

SEQ ID NO: 1111 - protein, 10 aa, Artificial Sequence
  Synthetic
IVGVALLAVF

SEQ ID NO: 1112 - protein, 9 aa, Artificial Sequence
  Synthetic
ALLAVFQSA

SEQ ID NO: 1113 - protein, 9 aa, Artificial Sequence
  Synthetic
QSASKIITL

SEQ ID NO: 1114 - protein, 12 aa, Artificial Sequence
  Synthetic
SASKIITLKKRW

SEQ ID NO: 1115 - protein, 9 aa, Artificial Sequence
  Synthetic
SASKIITLK

SEQ ID NO: 1116 - protein, 9 aa, Artificial Sequence
  Synthetic
ITLKKRWQL

SEQ ID NO: 1117 - protein, 11 aa, Artificial Sequence
  Synthetic
ITLKKRWQLAL

SEQ ID NO: 1118 - protein, 9 aa, Artificial Sequence
  Synthetic
TLKKRWQLA

SEQ ID NO: 1119 - protein, 9 aa, Artificial Sequence
  Synthetic
ALSKGVHFV

SEQ ID NO: 1120 - protein, 9 aa, Artificial Sequence
  Synthetic
NLLLLFVTV

SEQ ID NO: 1121 - protein, 9 aa, Artificial Sequence
  Synthetic
FVTVYSHLL

SEQ ID NO: 1122 - protein, 9 aa, Artificial Sequence
  Synthetic
TVYSHLLLV

SEQ ID NO: 1123 - protein, 9 aa, Artificial Sequence
  Synthetic
VAAGLEAPF

SEQ ID NO: 1124 - protein, 12 aa, Artificial Sequence
  Synthetic
AAGLEAPFLYLY

SEQ ID NO: 1125 - protein, 10 aa, Artificial Sequence
  Synthetic
AAGLEAPFLY

SEQ ID NO: 1126 - protein, 9 aa, Artificial Sequence
  Synthetic
AGLEAPFLY

SEQ ID NO: 1127 - protein, 9 aa, Artificial Sequence
  Synthetic
GLEAPFLYL

SEQ ID NO: 1128 - protein, 9 aa, Artificial Sequence
  Synthetic
LEAPFLYLY

SEQ ID NO: 1129 - protein, 9 aa, Artificial Sequence
  Synthetic
APFLYLYAL

SEQ ID NO: 1130 - protein, 9 aa, Artificial Sequence
  Synthetic
FLYLYALVY

SEQ ID NO: 1131 - protein, 9 aa, Artificial Sequence
  Synthetic
LYLYALVYF

SEQ ID NO: 1132 - protein, 9 aa, Artificial Sequence
  Synthetic
YLYALVYFL

SEQ ID NO: 1133 - protein, 9 aa, Artificial Sequence
  Synthetic
VYFLQSINF

SEQ ID NO: 1134 - protein, 9 aa, Artificial Sequence
  Synthetic
FVRIIMRLW

SEQ ID NO: 1135 - protein, 9 aa, Artificial Sequence
  Synthetic
VRIIMRLWL

SEQ ID NO: 1136 - protein, 9 aa, Artificial Sequence
  Synthetic
CRSKNPLLY

SEQ ID NO: 1137 - protein, 9 aa, Artificial Sequence
  Synthetic
NPLLYDANY

SEQ ID NO: 1138 - protein, 13 aa, Artificial Sequence
  Synthetic
NPLLYDANYFLCW

SEQ ID NO: 1139 - protein, 11 aa, Artificial Sequence
  Synthetic
NPLLYDANYFL

SEQ ID NO: 1140 - protein, 9 aa, Artificial Sequence
  Synthetic
LLYDANYFL

SEQ ID NO: 1141 - protein, 12 aa, Artificial Sequence
  Synthetic
IPYNSVTSSIVI

SEQ ID NO: 1142 - protein, 10 aa, Artificial Sequence
  Synthetic
IPYNSVTSSI

SEQ ID NO: 1143 - protein, 10 aa, Artificial Sequence
  Synthetic
TTSPISEHDY

SEQ ID NO: 1144 - protein, 14 aa, Artificial Sequence
  Synthetic
SEHDYQIGGYTEKW

SEQ ID NO: 1145 - protein, 14 aa, Artificial Sequence
  Synthetic
VLHSYFTSDYYQLY

SEQ ID NO: 1146 - protein, 9 aa, Artificial Sequence
  Synthetic
HSYFTSDYY

SEQ ID NO: 1147 - protein, 11 aa, Artificial Sequence
  Synthetic
SYFTSDYYQLY

SEQ ID NO: 1148 - protein, 10 aa, Artificial Sequence
  Synthetic
YFTSDYYQLY

SEQ ID NO: 1149 - protein, 9 aa, Artificial Sequence
  Synthetic
YFTSDYYQL

SEQ ID NO: 1150 - protein, 9 aa, Artificial Sequence
  Synthetic
FTSDYYQLY

SEQ ID NO: 1151 - protein, 10 aa, Artificial Sequence
  Synthetic
DYYQLYSTQL

SEQ ID NO: 1152 - protein, 9 aa, Artificial Sequence
  Synthetic
YYQLYSTQL

SEQ ID NO: 1153 - protein, 9 aa, Artificial Sequence
  Synthetic
HVTFFIYNK

SEQ ID NO: 1154 - protein, 9 aa, Artificial Sequence
  Synthetic
EEHVQIHTI

SEQ ID NO: 1155 - protein, 9 aa, Artificial Sequence
  Synthetic
IYDEPTTTT

SEQ ID NO: 1156 - protein, 10 aa, Artificial Sequence
  Synthetic
HLVDFQVTIA

SEQ ID NO: 1157 - protein, 9 aa, Artificial Sequence
  Synthetic
HLVDFQVTI

SEQ ID NO: 1158 - protein, 9 aa, Artificial Sequence
  Synthetic
VTIAEILLI

SEQ ID NO: 1159 - protein, 9 aa, Artificial Sequence
  Synthetic
LIIMRTFKV

SEQ ID NO: 1160 - protein, 12 aa, Artificial Sequence
  Synthetic
RTFKVSIWNLDY

SEQ ID NO: 1161 - protein, 9 aa, Artificial Sequence
  Synthetic
TFKVSIWNL

SEQ ID NO: 1162 - protein, 11 aa, Artificial Sequence
  Synthetic
SIWNLDYIINL

SEQ ID NO: 1163 - protein, 9 aa, Artificial Sequence
  Synthetic
LDYIINLII

SEQ ID NO: 1164 - protein, 14 aa, Artificial Sequence
  Synthetic
IIKNLSKSLTENKY

SEQ ID NO: 1165 - protein, 10 aa, Artificial Sequence
  Synthetic
QECVRGTTVL

SEQ ID NO: 1166 - protein, 11 aa, Artificial Sequence
  Synthetic
LLKEPCSSGTY

SEQ ID NO: 1167 - protein, 10 aa, Artificial Sequence
  Synthetic
YEGNSPFHPL

SEQ ID NO: 1168 - protein, 9 aa, Artificial Sequence
  Synthetic
EGNSPFHPL

SEQ ID NO: 1169 - protein, 13 aa, Artificial Sequence
  Synthetic
SPFHPLADNKFAL

SEQ ID NO: 1170 - protein, 10 aa, Artificial Sequence
  Synthetic
HPLADNKFAL

SEQ ID NO: 1171 - protein, 11 aa, Artificial Sequence
  Synthetic
KFALTCFSTQF

SEQ ID NO: 1172 - protein, 11 aa, Artificial Sequence
  Synthetic
FACPDGVKHVY

SEQ ID NO: 1173 - protein, 10 aa, Artificial Sequence
  Synthetic
QLRARSVSPK

SEQ ID NO: 1174 - protein, 9 aa, Artificial Sequence
  Synthetic
RARSVSPKL

SEQ ID NO: 1175 - protein, 12 aa, Artificial Sequence
  Synthetic
RARSVSPKLFIR

SEQ ID NO: 1176 - protein, 9 aa, Artificial Sequence
  Synthetic
KLFIRQEEV

SEQ ID NO: 1177 - protein, 11 aa, Artificial Sequence
  Synthetic
FIRQEEVQELY

SEQ ID NO: 1178 - protein, 12 aa, Artificial Sequence
  Synthetic
VQELYSPIFLIV

SEQ ID NO: 1179 - protein, 9 aa, Artificial Sequence
  Synthetic
SPIFLIVAA

SEQ ID NO: 1180 - protein, 10 aa, Artificial Sequence
  Synthetic
VFITLCFTLK

SEQ ID NO: 1181 - protein, 10 aa, Artificial Sequence
  Synthetic
IMLIIFWFSL

SEQ ID NO: 1182 - protein, 8 aa, Artificial Sequence
  Synthetic
FLGIITTV

SEQ ID NO: 1183 - protein, 9 aa, Artificial Sequence
  Synthetic
QSCTQHQPY

SEQ ID NO: 1184 - protein, 12 aa, Artificial Sequence
  Synthetic
YVVDDPCPIHFY

SEQ ID NO: 1185 - protein, 10 aa, Artificial Sequence
  Synthetic
VDDPCPIHFY

SEQ ID NO: 1186 - protein, 10 aa, Artificial Sequence
  Synthetic
RVGARKSAPL

SEQ ID NO: 1187 - protein, 9 aa, Artificial Sequence
  Synthetic
IQYIDIGNY

SEQ ID NO: 1188 - protein, 12 aa, Artificial Sequence
  Synthetic
GNYTVSCLPFTI

SEQ ID NO: 1189 - protein, 9 aa, Artificial Sequence
  Synthetic
EPKLGSLVV

SEQ ID NO: 1190 - protein, 9 aa, Artificial Sequence
  Synthetic
KLGSLVVRC

SEQ ID NO: 1191 - protein, 14 aa, Artificial Sequence
  Synthetic
YEDFLEYHDVRVVL

SEQ ID NO: 1192 - protein, 10 aa, Artificial Sequence
  Synthetic
LEYHDVRVVL

SEQ ID NO: 1193 - protein, 9 aa, Artificial Sequence
  Synthetic
EYHDVRVVL

SEQ ID NO: 1194 - protein, 11 aa, Artificial Sequence
  Synthetic
EYHDVRVVLDF

SEQ ID NO: 1195 - protein, 9 aa, Artificial Sequence
  Synthetic
YINVFAFPF

SEQ ID NO: 1196 - protein, 9 aa, Artificial Sequence
  Synthetic
NVFAFPFTI

SEQ ID NO: 1197 - protein, 14 aa, Artificial Sequence
  Synthetic
SLLLCRMNSRNYIA

SEQ ID NO: 1198 - protein, 13 aa, Artificial Sequence
  Synthetic
NYIAQVDVVNFNL

SEQ ID NO: 1199 - protein, 9 aa, Artificial Sequence
  Synthetic
FVFLVLLPL

SEQ ID NO: 1200 - protein, 9 aa, Artificial Sequence
  Synthetic
LPLVSSQCV

SEQ ID NO: 1201 - protein, 8 aa, Artificial Sequence
  Synthetic
NLTTRTQL

SEQ ID NO: 1202 - protein, 9 aa, Artificial Sequence
  Synthetic
TRTQLPPAY

SEQ ID NO: 1203 - protein, 9 aa, Artificial Sequence
  Synthetic
LPPAYTNSF

SEQ ID NO: 1204 - protein, 10 aa, Artificial Sequence
  Synthetic
YTNSFTRGVY

SEQ ID NO: 1205 - protein, 11 aa, Artificial Sequence
  Synthetic
YTNSFTRGVYY

SEQ ID NO: 1206 - protein, 9 aa, Artificial Sequence
  Synthetic
NSFTRGVYY

SEQ ID NO: 1207 - protein, 10 aa, Artificial Sequence
  Synthetic
GVYYPDKVFR

SEQ ID NO: 1208 - protein, 14 aa, Artificial Sequence
  Synthetic
VYYPDKVFRSSVLH

SEQ ID NO: 1209 - protein, 8 aa, Artificial Sequence
  Synthetic
VYYPDKVF

SEQ ID NO: 1210 - protein, 9 aa, Artificial Sequence
  Synthetic
KVFRSSVLH

SEQ ID NO: 1211 - protein, 9 aa, Artificial Sequence
  Synthetic
FRSSVLHST

SEQ ID NO: 1212 - protein, 10 aa, Artificial Sequence
  Synthetic
STQDLFLPFF

SEQ ID NO: 1213 - protein, 9 aa, Artificial Sequence
  Synthetic
STQDLFLPF

SEQ ID NO: 1214 - protein, 9 aa, Artificial Sequence
  Synthetic
TQDLFLPFF

SEQ ID NO: 1215 - protein, 10 aa, Artificial Sequence
  Synthetic
FLPFFSNVTW

SEQ ID NO: 1216 - protein, 14 aa, Artificial Sequence
  Synthetic
FLPFFSNVTWFHAI

SEQ ID NO: 1217 - protein, 8 aa, Artificial Sequence
  Synthetic
FLPFFSNV

SEQ ID NO: 1218 - protein, 9 aa, Artificial Sequence
  Synthetic
PFFSNVTWF

SEQ ID NO: 1219 - protein, 9 aa, Artificial Sequence
  Synthetic
HVSGTNGTK

SEQ ID NO: 1220 - protein, 9 aa, Artificial Sequence
  Synthetic
RFDNPVLPF

SEQ ID NO: 1221 - protein, 14 aa, Artificial Sequence
  Synthetic
FDNPVLPFNDGVYF

SEQ ID NO: 1222 - protein, 11 aa, Artificial Sequence
  Synthetic
VLPFNDGVYFA

SEQ ID NO: 1223 - protein, 9 aa, Artificial Sequence
  Synthetic
LPFNDGVYF

SEQ ID NO: 1224 - protein, 10 aa, Artificial Sequence
  Synthetic
DGVYFASTEK

SEQ ID NO: 1225 - protein, 9 aa, Artificial Sequence
  Synthetic
GVYFASTEK

SEQ ID NO: 1226 - protein, 10 aa, Artificial Sequence
  Synthetic
TEKSNIIRGW

SEQ ID NO: 1227 - protein, 10 aa, Artificial Sequence
  Synthetic
WIFGTTLDSK

SEQ ID NO: 1228 - protein, 9 aa, Artificial Sequence
  Synthetic
TLDSKTQSL

SEQ ID NO: 1229 - protein, 11 aa, Artificial Sequence
  Synthetic
FCNDPFLGVYY

SEQ ID NO: 1230 - protein, 9 aa, Artificial Sequence
  Synthetic
CNDPFLGVY

SEQ ID NO: 1231 - protein, 9 aa, Artificial Sequence
  Synthetic
GVYYHKNNK

SEQ ID NO: 1232 - protein, 9 aa, Artificial Sequence
  Synthetic
YYHKNNKSW

SEQ ID NO: 1233 - protein, 11 aa, Artificial Sequence
  Synthetic
KSWMESEFRVY

SEQ ID NO: 1234 - protein, 9 aa, Artificial Sequence
  Synthetic
SWMESEFRV

SEQ ID NO: 1235 - protein, 10 aa, Artificial Sequence
  Synthetic
SWMESEFRVY

SEQ ID NO: 1236 - protein, 12 aa, Artificial Sequence
  Synthetic
VYSSANNCTFEY

SEQ ID NO: 1237 - protein, 10 aa, Artificial Sequence
  Synthetic
VYSSANNCTF

SEQ ID NO: 1238 - protein, 10 aa, Artificial Sequence
  Synthetic
SSANNCTFEY

SEQ ID NO: 1239 - protein, 9 aa, Artificial Sequence
  Synthetic
SANNCTFEY

SEQ ID NO: 1240 - protein, 12 aa, Artificial Sequence
  Synthetic
CTFEYVSQPFLM

SEQ ID NO: 1241 - protein, 11 aa, Artificial Sequence
  Synthetic
TFEYVSQPFLM

SEQ ID NO: 1242 - protein, 10 aa, Artificial Sequence
  Synthetic
FEYVSQPFLM

SEQ ID NO: 1243 - protein, 9 aa, Artificial Sequence
  Synthetic
EYVSQPFLM

SEQ ID NO: 1244 - protein, 9 aa, Artificial Sequence
  Synthetic
FKNLREFVF

SEQ ID NO: 1245 - protein, 9 aa, Artificial Sequence
  Synthetic
FVFKNIDGY

SEQ ID NO: 1246 - protein, 9 aa, Artificial Sequence
  Synthetic
VFKNIDGYF

SEQ ID NO: 1247 - protein, 9 aa, Artificial Sequence
  Synthetic
KIYSKHTPI

SEQ ID NO: 1248 - protein, 10 aa, Artificial Sequence
  Synthetic
IYSKHTPINL

SEQ ID NO: 1249 - protein, 9 aa, Artificial Sequence
  Synthetic
TPINLVRDL

SEQ ID NO: 1250 - protein, 11 aa, Artificial Sequence
  Synthetic
LPQGFSALEPL

SEQ ID NO: 1251 - protein, 8 aa, Artificial Sequence
  Synthetic
LPQGFSAL

SEQ ID NO: 1252 - protein, 9 aa, Artificial Sequence
  Synthetic
LEPLVDLPI

SEQ ID NO: 1253 - protein, 8 aa, Artificial Sequence
  Synthetic
EPLVDLPI

SEQ ID NO: 1254 - protein, 14 aa, Artificial Sequence
  Synthetic
DLPIGINITRFQTL

SEQ ID NO: 1255 - protein, 10 aa, Artificial Sequence
  Synthetic
LPIGINITRF

SEQ ID NO: 1256 - protein, 9 aa, Artificial Sequence
  Synthetic
INITRFQTL

SEQ ID NO: 1257 - protein, 8 aa, Artificial Sequence
  Synthetic
NITRFQTL

SEQ ID NO: 1258 - protein, 9 aa, Artificial Sequence
  Synthetic
LLALHRSYL

SEQ ID NO: 1259 - protein, 9 aa, Artificial Sequence
  Synthetic
WTAGAAAYY

SEQ ID NO: 1260 - protein, 12 aa, Artificial Sequence
  Synthetic
WTAGAAAYYVGY

SEQ ID NO: 1261 - protein, 9 aa, Artificial Sequence
  Synthetic
GAAAYYVGY

SEQ ID NO: 1262 - protein, 13 aa, Artificial Sequence
  Synthetic
YYVGYLQPRTFLL

SEQ ID NO: 1263 - protein, 11 aa, Artificial Sequence
  Synthetic
YYVGYLQPRTF

SEQ ID NO: 1264 - protein, 10 aa, Artificial Sequence
  Synthetic
VGYLQPRTFL

SEQ ID NO: 1265 - protein, 10 aa, Artificial Sequence
  Synthetic
GYLQPRTFLL

SEQ ID NO: 1266 - protein, 9 aa, Artificial Sequence
  Synthetic
YLQPRTFLL

SEQ ID NO: 1267 - protein, 10 aa, Artificial Sequence
  Synthetic
CALDPLSETK

SEQ ID NO: 1268 - protein, 9 aa, Artificial Sequence
  Synthetic
ALDPLSETK

SEQ ID NO: 1269 - protein, 10 aa, Artificial Sequence
  Synthetic
SETKCTLKSF

SEQ ID NO: 1270 - protein, 14 aa, Artificial Sequence
  Synthetic
SETKCTLKSFTVEK

SEQ ID NO: 1271 - protein, 9 aa, Artificial Sequence
  Synthetic
ETKCTLKSF

SEQ ID NO: 1272 - protein, 9 aa, Artificial Sequence
  Synthetic
IYQTSNFRV

SEQ ID NO: 1273 - protein, 11 aa, Artificial Sequence
  Synthetic
RVQPTESIVRF

SEQ ID NO: 1274 - protein, 9 aa, Artificial Sequence
  Synthetic
QPTESIVRF

SEQ ID NO: 1275 - protein, 13 aa, Artificial Sequence
  Synthetic
TESIVRFPNITNL

SEQ ID NO: 1276 - protein, 11 aa, Artificial Sequence
  Synthetic
RFPNITNLCPF

SEQ ID NO: 1277 - protein, 14 aa, Artificial Sequence
  Synthetic
FGEVFNATRFASVY

SEQ ID NO: 1278 - protein, 9 aa, Artificial Sequence
  Synthetic
GEVFNATRF

SEQ ID NO: 1279 - protein, 12 aa, Artificial Sequence
  Synthetic
EVFNATRFASVY

SEQ ID NO: 1280 - protein, 9 aa, Artificial Sequence
  Synthetic
NATRFASVY

SEQ ID NO: 1281 - protein, 9 aa, Artificial Sequence
  Synthetic
TRFASVYAW

SEQ ID NO: 1282 - protein, 10 aa, Artificial Sequence
  Synthetic
RFASVYAWNR

SEQ ID NO: 1283 - protein, 9 aa, Artificial Sequence
  Synthetic
FASVYAWNR

SEQ ID NO: 1284 - protein, 9 aa, Artificial Sequence
  Synthetic
SVYAWNRKR

SEQ ID NO: 1285 - protein, 8 aa, Artificial Sequence
  Synthetic
YAWNRKRI

SEQ ID NO: 1286 - protein, 9 aa, Artificial Sequence
  Synthetic
RISNCVADY

SEQ ID NO: 1287 - protein, 9 aa, Artificial Sequence
  Synthetic
CVADYSVLY

SEQ ID NO: 1288 - protein, 14 aa, Artificial Sequence
  Synthetic
YSVLYNSASFSTFK

SEQ ID NO: 1289 - protein, 9 aa, Artificial Sequence
  Synthetic
NSASFSTFK

SEQ ID NO: 1290 - protein, 10 aa, Artificial Sequence
  Synthetic
SASFSTFKCY

SEQ ID NO: 1291 - protein, 9 aa, Artificial Sequence
  Synthetic
KCYGVSPTK

SEQ ID NO: 1292 - protein, 10 aa, Artificial Sequence
  Synthetic
KLNDLCFTNV

SEQ ID NO: 1293 - protein, 10 aa, Artificial Sequence
  Synthetic
NVYADSFVIR

SEQ ID NO: 1294 - protein, 9 aa, Artificial Sequence
  Synthetic
FVIRGDEVR

SEQ ID NO: 1295 - protein, 9 aa, Artificial Sequence
  Synthetic
QIAPGQTGK

SEQ ID NO: 1296 - protein, 9 aa, Artificial Sequence
  Synthetic
KIADYNYKL

SEQ ID NO: 1297 - protein, 10 aa, Artificial Sequence
  Synthetic
KLPDDFTGCV

SEQ ID NO: 1298 - protein, 10 aa, Artificial Sequence
  Synthetic
NLDSKVGGNY

SEQ ID NO: 1299 - protein, 10 aa, Artificial Sequence
  Synthetic
DSKVGGNYNY

SEQ ID NO: 1300 - protein, 10 aa, Artificial Sequence
  Synthetic
KVGGNYNYLY

SEQ ID NO: 1301 - protein, 9 aa, Artificial Sequence
  Synthetic
VGGNYNYLY

SEQ ID NO: 1302 - protein, 10 aa, Artificial Sequence
  Synthetic
GNYNYLYRLF

SEQ ID NO: 1303 - protein, 9 aa, Artificial Sequence
  Synthetic
NYNYLYRLF

SEQ ID NO: 1304 - protein, 11 aa, Artificial Sequence
  Synthetic
NYNYLYRLFRK

SEQ ID NO: 1305 - protein, 9 aa, Artificial Sequence
  Synthetic
YNYLYRLFR

SEQ ID NO: 1306 - protein, 9 aa, Artificial Sequence
  Synthetic
RLFRKSNLK

SEQ ID NO: 1307 - protein, 9 aa, Artificial Sequence
  Synthetic
KSNLKPFER

SEQ ID NO: 1308 - protein, 11 aa, Artificial Sequence
  Synthetic
KPFERDISTEI

SEQ ID NO: 1309 - protein, 12 aa, Artificial Sequence
  Synthetic
KPFERDISTEIY

SEQ ID NO: 1310 - protein, 10 aa, Artificial Sequence
  Synthetic
FERDISTEIY

SEQ ID NO: 1311 - protein, 9 aa, Artificial Sequence
  Synthetic
FERDISTEI

SEQ ID NO: 1312 - protein, 9 aa, Artificial Sequence
  Synthetic
NGVEGFNCY

SEQ ID NO: 1313 - protein, 9 aa, Artificial Sequence
  Synthetic
YFPLQSYGF

SEQ ID NO: 1314 - protein, 9 aa, Artificial Sequence
  Synthetic
YGFQPTNGV

SEQ ID NO: 1315 - protein, 9 aa, Artificial Sequence
  Synthetic
FQPTNGVGY

SEQ ID NO: 1316 - protein, 9 aa, Artificial Sequence
  Synthetic
VGYQPYRVV

SEQ ID NO: 1317 - protein, 12 aa, Artificial Sequence
  Synthetic
GYQPYRVVVLSF

SEQ ID NO: 1318 - protein, 9 aa, Artificial Sequence
  Synthetic
YQPYRVVVL

SEQ ID NO: 1319 - protein, 8 aa, Artificial Sequence
  Synthetic
QPYRVVVL

SEQ ID NO: 1320 - protein, 10 aa, Artificial Sequence
  Synthetic
QPYRVVVLSF

SEQ ID NO: 1321 - protein, 11 aa, Artificial Sequence
  Synthetic
SFELLHAPATV

SEQ ID NO: 1322 - protein, 10 aa, Artificial Sequence
  Synthetic
FELLHAPATV

SEQ ID NO: 1323 - protein, 9 aa, Artificial Sequence
  Synthetic
ELLHAPATV

SEQ ID NO: 1324 - protein, 9 aa, Artificial Sequence
  Synthetic
GPKKSTNLV

SEQ ID NO: 1325 - protein, 9 aa, Artificial Sequence
  Synthetic
LVKNKCVNF

SEQ ID NO: 1326 - protein, 9 aa, Artificial Sequence
  Synthetic
VLTESNKKF

SEQ ID NO: 1327 - protein, 13 aa, Artificial Sequence
  Synthetic
TESNKKFLPFQQF

SEQ ID NO: 1328 - protein, 10 aa, Artificial Sequence
  Synthetic
KFLPFQQFGR

SEQ ID NO: 1329 - protein, 9 aa, Artificial Sequence
  Synthetic
DAVRDPQTL

SEQ ID NO: 1330 - protein, 10 aa, Artificial Sequence
  Synthetic
EILDITPCSF

SEQ ID NO: 1331 - protein, 10 aa, Artificial Sequence
  Synthetic
TPCSFGGVSV

SEQ ID NO: 1332 - protein, 10 aa, Artificial Sequence
  Synthetic
NTSNQVAVLY

SEQ ID NO: 1333 - protein, 9 aa, Artificial Sequence
  Synthetic
TSNQVAVLY

SEQ ID NO: 1334 - protein, 9 aa, Artificial Sequence
  Synthetic
YQDVNCTEV

SEQ ID NO: 1335 - protein, 12 aa, Artificial Sequence
  Synthetic
VAIHADQLTPTW

SEQ ID NO: 1336 - protein, 10 aa, Artificial Sequence
  Synthetic
IHADQLTPTW

SEQ ID NO: 1337 - protein, 9 aa, Artificial Sequence
  Synthetic
QLTPTWRVY

SEQ ID NO: 1338 - protein, 9 aa, Artificial Sequence
  Synthetic
RVYSTGSNV

SEQ ID NO: 1339 - protein, 10 aa, Artificial Sequence
  Synthetic
RVYSTGSNVF

SEQ ID NO: 1340 - protein, 12 aa, Artificial Sequence
  Synthetic
VYSTGSNVFQTR

SEQ ID NO: 1341 - protein, 10 aa, Artificial Sequence
  Synthetic
STGSNVFQTR

SEQ ID NO: 1342 - protein, 10 aa, Artificial Sequence
  Synthetic
IGAEHVNNSY

SEQ ID NO: 1343 - protein, 8 aa, Artificial Sequence
  Synthetic
AEHVNNSY

SEQ ID NO: 1344 - protein, 11 aa, Artificial Sequence
  Synthetic
YECDIPIGAGI

SEQ ID NO: 1345 - protein, 11 aa, Artificial Sequence
  Synthetic
IPIGAGICASY

SEQ ID NO: 1346 - protein, 9 aa, Artificial Sequence
  Synthetic
QTNSPRRAR

SEQ ID NO: 1347 - protein, 9 aa, Artificial Sequence
  Synthetic
SPRRARSVA

SEQ ID NO: 1348 - protein, 8 aa, Artificial Sequence
  Synthetic
SPRRARSV

SEQ ID NO: 1349 - protein, 9 aa, Artificial Sequence
  Synthetic
RSVASQSII

SEQ ID NO: 1350 - protein, 10 aa, Artificial Sequence
  Synthetic
SVASQSIIAY

SEQ ID NO: 1351 - protein, 9 aa, Artificial Sequence
  Synthetic
VASQSIIAY

SEQ ID NO: 1352 - protein, 9 aa, Artificial Sequence
  Synthetic
SIIAYTMSL

SEQ ID NO: 1353 - protein, 13 aa, Artificial Sequence
  Synthetic
YTMSLGAENSVAY

SEQ ID NO: 1354 - protein, 9 aa, Artificial Sequence
  Synthetic
LGAENSVAY

SEQ ID NO: 1355 - protein, 12 aa, Artificial Sequence
  Synthetic
LGAENSVAYSNN

SEQ ID NO: 1356 - protein, 9 aa, Artificial Sequence
  Synthetic
AYSNNSIAI

SEQ ID NO: 1357 - protein, 9 aa, Artificial Sequence
  Synthetic
NSIAIPTNF

SEQ ID NO: 1358 - protein, 9 aa, Artificial Sequence
  Synthetic
IAIPTNFTI

SEQ ID NO: 1359 - protein, 9 aa, Artificial Sequence
  Synthetic
IPTNFTISV

SEQ ID NO: 1360 - protein, 9 aa, Artificial Sequence
  Synthetic
FTISVTTEI

SEQ ID NO: 1361 - protein, 10 aa, Artificial Sequence
  Synthetic
FTISVTTEIL

SEQ ID NO: 1362 - protein, 10 aa, Artificial Sequence
  Synthetic
TEILPVSMTK

SEQ ID NO: 1363 - protein, 9 aa, Artificial Sequence
  Synthetic
EILPVSMTK

SEQ ID NO: 1364 - protein, 10 aa, Artificial Sequence
  Synthetic
KTSVDCTMYI

SEQ ID NO: 1365 - protein, 11 aa, Artificial Sequence
  Synthetic
STECSNLLLQY

SEQ ID NO: 1366 - protein, 10 aa, Artificial Sequence
  Synthetic
TECSNLLLQY

SEQ ID NO: 1367 - protein, 9 aa, Artificial Sequence
  Synthetic
LLQYGSFCT

SEQ ID NO: 1368 - protein, 9 aa, Artificial Sequence
  Synthetic
GSFCTQLNR

SEQ ID NO: 1369 - protein, 10 aa, Artificial Sequence
  Synthetic
TQLNRALTGI

SEQ ID NO: 1370 - protein, 11 aa, Artificial Sequence
  Synthetic
QEVFAQVKQIY

SEQ ID NO: 1371 - protein, 12 aa, Artificial Sequence
  Synthetic
QEVFAQVKQIYK

SEQ ID NO: 1372 - protein, 9 aa, Artificial Sequence
  Synthetic
EVFAQVKQI

SEQ ID NO: 1373 - protein, 10 aa, Artificial Sequence
  Synthetic
EVFAQVKQIY

SEQ ID NO: 1374 - protein, 9 aa, Artificial Sequence
  Synthetic
VFAQVKQIY

SEQ ID NO: 1375 - protein, 12 aa, Artificial Sequence
  Synthetic
KQIYKTPPIKDF

SEQ ID NO: 1376 - protein, 10 aa, Artificial Sequence
  Synthetic
IYKTPPIKDF

SEQ ID NO: 1377 - protein, 10 aa, Artificial Sequence
  Synthetic
ILPDPSKPSK

SEQ ID NO: 1378 - protein, 8 aa, Artificial Sequence
  Synthetic
SFIEDLLF

SEQ ID NO: 1379 - protein, 9 aa, Artificial Sequence
  Synthetic
LLFNKVTLA

SEQ ID NO: 1380 - protein, 9 aa, Artificial Sequence
  Synthetic
TLADAGFIK

SEQ ID NO: 1381 - protein, 10 aa, Artificial Sequence
  Synthetic
LADAGFIKQY

SEQ ID NO: 1382 - protein, 9 aa, Artificial Sequence
  Synthetic
ADAGFIKQY

SEQ ID NO: 1383 - protein, 9 aa, Artificial Sequence
  Synthetic
GLTVLPPLL

SEQ ID NO: 1384 - protein, 9 aa, Artificial Sequence
  Synthetic
LPPLLTDEM

SEQ ID NO: 1385 - protein, 10 aa, Artificial Sequence
  Synthetic
LLTDEMIAQY

SEQ ID NO: 1386 - protein, 9 aa, Artificial Sequence
  Synthetic
LTDEMIAQY

SEQ ID NO: 1387 - protein, 10 aa, Artificial Sequence
  Synthetic
LTDEMIAQYT

SEQ ID NO: 1388 - protein, 8 aa, Artificial Sequence
  Synthetic
TDEMIAQY

SEQ ID NO: 1389 - protein, 9 aa, Artificial Sequence
  Synthetic
MIAQYTSAL

SEQ ID NO: 1390 - protein, 9 aa, Artificial Sequence
  Synthetic
GTITSGWTF

SEQ ID NO: 1391 - protein, 9 aa, Artificial Sequence
  Synthetic
WTFGAGAAL

SEQ ID NO: 1392 - protein, 11 aa, Artificial Sequence
  Synthetic
LQIPFAMQMAY

SEQ ID NO: 1393 - protein, 10 aa, Artificial Sequence
  Synthetic
QIPFAMQMAY

SEQ ID NO: 1394 - protein, 9 aa, Artificial Sequence
  Synthetic
IPFAMQMAY

SEQ ID NO: 1395 - protein, 9 aa, Artificial Sequence
  Synthetic
FAMQMAYRF

SEQ ID NO: 1396 - protein, 10 aa, Artificial Sequence
  Synthetic
TQNVLYENQK

SEQ ID NO: 1397 - protein, 11 aa, Artificial Sequence
  Synthetic
YENQKLIANQF

SEQ ID NO: 1398 - protein, 9 aa, Artificial Sequence
  Synthetic
NQKLIANQF

SEQ ID NO: 1399 - protein, 9 aa, Artificial Sequence
  Synthetic
IANQFNSAI

SEQ ID NO: 1400 - protein, 10 aa, Artificial Sequence
  Synthetic
LSSTASALGK

SEQ ID NO: 1401 - protein, 11 aa, Artificial Sequence
  Synthetic
AQALNTLVKQL

SEQ ID NO: 1402 - protein, 9 aa, Artificial Sequence
  Synthetic
ALNTLVKQL

SEQ ID NO: 1403 - protein, 9 aa, Artificial Sequence
  Synthetic
SVLNDILSR

SEQ ID NO: 1404 - protein, 10 aa, Artificial Sequence
  Synthetic
SVLNDILSRL

SEQ ID NO: 1405 - protein, 9 aa, Artificial Sequence
  Synthetic
VLNDILSRL

SEQ ID NO: 1406 - protein, 11 aa, Artificial Sequence
  Synthetic
RLDKVEAEVQI

SEQ ID NO: 1407 - protein, 9 aa, Artificial Sequence
  Synthetic
RLDKVEAEV

SEQ ID NO: 1408 - protein, 14 aa, Artificial Sequence
  Synthetic
VEAEVQIDRLITGR

SEQ ID NO: 1409 - protein, 8 aa, Artificial Sequence
  Synthetic
AEVQIDRL

SEQ ID NO: 1410 - protein, 9 aa, Artificial Sequence
  Synthetic
AEVQIDRLI

SEQ ID NO: 1411 - protein, 13 aa, Artificial Sequence
  Synthetic
LITGRLQSLQTYV

SEQ ID NO: 1412 - protein, 11 aa, Artificial Sequence
  Synthetic
ITGRLQSLQTY

SEQ ID NO: 1413 - protein, 9 aa, Artificial Sequence
  Synthetic
LITGRLQSL

SEQ ID NO: 1414 - protein, 8 aa, Artificial Sequence
  Synthetic
RLQSLQTY

SEQ ID NO: 1415 - protein, 9 aa, Artificial Sequence
  Synthetic
RLQSLQTYV

SEQ ID NO: 1416 - protein, 13 aa, Artificial Sequence
  Synthetic
AEIRASANLAATK

SEQ ID NO: 1417 - protein, 9 aa, Artificial Sequence
  Synthetic
AEIRASANL

SEQ ID NO: 1418 - protein, 10 aa, Artificial Sequence
  Synthetic
RASANLAATK

SEQ ID NO: 1419 - protein, 11 aa, Artificial Sequence
  Synthetic
SKRVDFCGKGY

SEQ ID NO: 1420 - protein, 9 aa, Artificial Sequence
  Synthetic
RVDFCGKGY

SEQ ID NO: 1421 - protein, 10 aa, Artificial Sequence
  Synthetic
YHLMSFPQSA

SEQ ID NO: 1422 - protein, 9 aa, Artificial Sequence
  Synthetic
HLMSFPQSA

SEQ ID NO: 1423 - protein, 12 aa, Artificial Sequence
  Synthetic
SFPQSAPHGVVF

SEQ ID NO: 1424 - protein, 9 aa, Artificial Sequence
  Synthetic
FPQSAPHGV

SEQ ID NO: 1425 - protein, 11 aa, Artificial Sequence
  Synthetic
FPQSAPHGVVF

SEQ ID NO: 1426 - protein, 9 aa, Artificial Sequence
  Synthetic
QSAPHGVVF

SEQ ID NO: 1427 - protein, 13 aa, Artificial Sequence
  Synthetic
APHGVVFLHVTYV

SEQ ID NO: 1428 - protein, 10 aa, Artificial Sequence
  Synthetic
APHGVVFLHV

SEQ ID NO: 1429 - protein, 8 aa, Artificial Sequence
  Synthetic
APHGVVFL

SEQ ID NO: 1430 - protein, 9 aa, Artificial Sequence
  Synthetic
GVVFLHVTY

SEQ ID NO: 1431 - protein, 9 aa, Artificial Sequence
  Synthetic
VVFLHVTYV

SEQ ID NO: 1432 - protein, 10 aa, Artificial Sequence
  Synthetic
HVTYVPAQEK

SEQ ID NO: 1433 - protein, 12 aa, Artificial Sequence
  Synthetic
HVTYVPAQEKNF

SEQ ID NO: 1434 - protein, 9 aa, Artificial Sequence
  Synthetic
VTYVPAQEK

SEQ ID NO: 1435 - protein, 11 aa, Artificial Sequence
  Synthetic
TYVPAQEKNFT

SEQ ID NO: 1436 - protein, 8 aa, Artificial Sequence
  Synthetic
FPREGVFV

SEQ ID NO: 1437 - protein, 12 aa, Artificial Sequence
  Synthetic
REGVFVSNGTHW

SEQ ID NO: 1438 - protein, 10 aa, Artificial Sequence
  Synthetic
GVFVSNGTHW

SEQ ID NO: 1439 - protein, 9 aa, Artificial Sequence
  Synthetic
VFVSNGTHW

SEQ ID NO: 1440 - protein, 10 aa, Artificial Sequence
  Synthetic
VFVSNGTHWF

SEQ ID NO: 1441 - protein, 9 aa, Artificial Sequence
  Synthetic
FVSNGTHWF

SEQ ID NO: 1442 - protein, 9 aa, Artificial Sequence
  Synthetic
GTHWFVTQR

SEQ ID NO: 1443 - protein, 9 aa, Artificial Sequence
  Synthetic
HWFVTQRNF

SEQ ID NO: 1444 - protein, 9 aa, Artificial Sequence
  Synthetic
WFVTQRNFY

SEQ ID NO: 1445 - protein, 9 aa, Artificial Sequence
  Synthetic
IITTDNTFV

SEQ ID NO: 1446 - protein, 14 aa, Artificial Sequence
  Synthetic
TVYDPLQPELDSFK

SEQ ID NO: 1447 - protein, 12 aa, Artificial Sequence
  Synthetic
VYDPLQPELDSF

SEQ ID NO: 1448 - protein, 10 aa, Artificial Sequence
  Synthetic
DSFKEELDKY

SEQ ID NO: 1449 - protein, 9 aa, Artificial Sequence
  Synthetic
SFKEELDKY

SEQ ID NO: 1450 - protein, 9 aa, Artificial Sequence
  Synthetic
NASVVNIQK

SEQ ID NO: 1451 - protein, 9 aa, Artificial Sequence
  Synthetic
KEIDRLNEV

SEQ ID NO: 1452 - protein, 9 aa, Artificial Sequence
  Synthetic
RLNEVAKNL

SEQ ID NO: 1453 - protein, 9 aa, Artificial Sequence
  Synthetic
NLNESLIDL

SEQ ID NO: 1454 - protein, 10 aa, Artificial Sequence
  Synthetic
NESLIDLQEL

SEQ ID NO: 1455 - protein, 8 aa, Artificial Sequence
  Synthetic
SLIDLQEL

SEQ ID NO: 1456 - protein, 10 aa, Artificial Sequence
  Synthetic
LQELGKYEQY

SEQ ID NO: 1457 - protein, 9 aa, Artificial Sequence
  Synthetic
QELGKYEQY

SEQ ID NO: 1458 - protein, 11 aa, Artificial Sequence
  Synthetic
YEQYIKWPWYI

SEQ ID NO: 1459 - protein, 9 aa, Artificial Sequence
  Synthetic
YEQYIKWPW

SEQ ID NO: 1460 - protein, 10 aa, Artificial Sequence
  Synthetic
QYIKWPWYIW

SEQ ID NO: 1461 - protein, 9 aa, Artificial Sequence
  Synthetic
QYIKWPWYI

SEQ ID NO: 1462 - protein, 10 aa, Artificial Sequence
  Synthetic
KWPWYIWLGF

SEQ ID NO: 1463 - protein, 9 aa, Artificial Sequence
  Synthetic
FIAGLIAIV

SEQ ID NO: 1464 - protein, 10 aa, Artificial Sequence
  Synthetic
CMTSCCSCLK

SEQ ID NO: 1465 - protein, 10 aa, Artificial Sequence
  Synthetic
FDEDDSEPVL

SEQ ID NO: 1466 - protein, 10 aa, Artificial Sequence
  Synthetic
SEPVLKGVKL

SEQ ID NO: 1467 - protein, 9 aa, Artificial Sequence
  Synthetic
EPVLKGVKL

SEQ ID NO: 1468 - protein, 9 aa, Artificial Sequence
  Synthetic
VLKGVKLHY

SEQ ID NO: 1469 - protein, 10 aa, Artificial Sequence
  Synthetic
YTNSFTRGVY

SEQ ID NO: 1470 - protein, 10 aa, Artificial Sequence
  Synthetic
STQDLFLPFF

SEQ ID NO: 1471 - protein, 9 aa, Artificial Sequence
  Synthetic
RFDNPVLPF

SEQ ID NO: 1472 - protein, 9 aa, Artificial Sequence
  Synthetic
GVYFASTEK

SEQ ID NO: 1473 - protein, 10 aa, Artificial Sequence
  Synthetic
TEKSNIIRGW

SEQ ID NO: 1474 - protein, 9 aa, Artificial Sequence
  Synthetic
TLDSKTQSL

SEQ ID NO: 1475 - protein, 10 aa, Artificial Sequence
  Synthetic
SSANNCTFEY

SEQ ID NO: 1476 - protein, 9 aa, Artificial Sequence
  Synthetic
FVFKNIDGY

SEQ ID NO: 1477 - protein, 10 aa, Artificial Sequence
  Synthetic
IYSKHTPINL

SEQ ID NO: 1478 - protein, 9 aa, Artificial Sequence
  Synthetic
TPINLVRDL

SEQ ID NO: 1479 - protein, 9 aa, Artificial Sequence
  Synthetic
LLALHRSYL

SEQ ID NO: 1480 - protein, 9 aa, Artificial Sequence
  Synthetic
WTAGAAAYY

SEQ ID NO: 1481 - protein, 9 aa, Artificial Sequence
  Synthetic
YLQPRTFLL

SEQ ID NO: 1482 - protein, 9 aa, Artificial Sequence
  Synthetic
RISNCVADY

SEQ ID NO: 1483 - protein, 9 aa, Artificial Sequence
  Synthetic
CVADYSVLY

SEQ ID NO: 1484 - protein, 9 aa, Artificial Sequence
  Synthetic
KCYGVSPTK

SEQ ID NO: 1485 - protein, 9 aa, Artificial Sequence
  Synthetic
KIADYNYKL

SEQ ID NO: 1486 - protein, 10 aa, Artificial Sequence
  Synthetic
KLPDDFTGCV

SEQ ID NO: 1487 - protein, 10 aa, Artificial Sequence
  Synthetic
NLDSKVGGNY

SEQ ID NO: 1488 - protein, 9 aa, Artificial Sequence
  Synthetic
NYNYLYRLF

SEQ ID NO: 1489 - protein, 9 aa, Artificial Sequence
  Synthetic
YFPLQSYGF

SEQ ID NO: 1490 - protein, 9 aa, Artificial Sequence
  Synthetic
FQPTNGVGY

SEQ ID NO: 1491 - protein, 9 aa, Artificial Sequence
  Synthetic
GPKKSTNLV

SEQ ID NO: 1492 - protein, 10 aa, Artificial Sequence
  Synthetic
EILDITPCSF

SEQ ID NO: 1493 - protein, 10 aa, Artificial Sequence
  Synthetic
IGAEHVNNSY

SEQ ID NO: 1494 - protein, 9 aa, Artificial Sequence
  Synthetic
SPRRARSVA

SEQ ID NO: 1495 - protein, 10 aa, Artificial Sequence
  Synthetic
SVASQSIIAY

SEQ ID NO: 1496 - protein, 9 aa, Artificial Sequence
  Synthetic
VASQSIIAY

SEQ ID NO: 1497 - protein, 9 aa, Artificial Sequence
  Synthetic
SIIAYTMSL

SEQ ID NO: 1498 - protein, 10 aa, Artificial Sequence
  Synthetic
FTISVTTEIL

SEQ ID NO: 1499 - protein, 10 aa, Artificial Sequence
  Synthetic
TEILPVSMTK

SEQ ID NO: 1500 - protein, 10 aa, Artificial Sequence
  Synthetic
TECSNLLLQY

SEQ ID NO: 1501 - protein, 9 aa, Artificial Sequence
  Synthetic
LLQYGSFCT

SEQ ID NO: 1502 - protein, 9 aa, Artificial Sequence
  Synthetic
LLFNKVTLA

SEQ ID NO: 1503 - protein, 9 aa, Artificial Sequence
  Synthetic
LTDEMIAQY

SEQ ID NO: 1504 - protein, 9 aa, Artificial Sequence
  Synthetic
MIAQYTSAL

SEQ ID NO: 1505 - protein, 9 aa, Artificial Sequence
  Synthetic
GTITSGWTF

SEQ ID NO: 1506 - protein, 10 aa, Artificial Sequence
  Synthetic
TQNVLYENQK

SEQ ID NO: 1507 - protein, 9 aa, Artificial Sequence
  Synthetic
NQKLIANQF

SEQ ID NO: 1508 - protein, 9 aa, Artificial Sequence
  Synthetic
VLNDILSRL

SEQ ID NO: 1509 - protein, 9 aa, Artificial Sequence
  Synthetic
RLDKVEAEV

SEQ ID NO: 1510 - protein, 9 aa, Artificial Sequence
  Synthetic
RLQSLQTYV

SEQ ID NO: 1511 - protein, 10 aa, Artificial Sequence
  Synthetic
YHLMSFPQSA

SEQ ID NO: 1512 - protein, 9 aa, Artificial Sequence
  Synthetic
HLMSFPQSA

SEQ ID NO: 1513 - protein, 10 aa, Artificial Sequence
  Synthetic
APHGVVFLHV

SEQ ID NO: 1514 - protein, 9 aa, Artificial Sequence
  Synthetic
VVFLHVTYV

SEQ ID NO: 1515 - protein, 9 aa, Artificial Sequence
  Synthetic
GTHWFVTQR

SEQ ID NO: 1516 - protein, 9 aa, Artificial Sequence
  Synthetic
RLNEVAKNL

SEQ ID NO: 1517 - protein, 9 aa, Artificial Sequence
  Synthetic
NLNESLIDL

SEQ ID NO: 1518 - protein, 9 aa, Artificial Sequence
  Synthetic
QYIKWPWYI

SEQ ID NO: 1519 - protein, 10 aa, Artificial Sequence
  Synthetic
KWPWYIWLGF

SEQ ID NO: 1520 - protein, 9 aa, Artificial Sequence
  Synthetic
FIAGLIAIV

SEQ ID NO: 1521 - protein, 10 aa, Artificial Sequence
  Synthetic
SEPVLKGVKL

SEQ ID NO: 1522 - protein, 9 aa, Artificial Sequence
  Synthetic
FVFLVLLPL

SEQ ID NO: 1523 - protein, 9 aa, Artificial Sequence
  Synthetic
LPLVSSQCV

SEQ ID NO: 1524 - protein, 9 aa, Artificial Sequence
  Synthetic
TRTQLPPAY

SEQ ID NO: 1525 - protein, 9 aa, Artificial Sequence
  Synthetic
LPPAYTNSF

SEQ ID NO: 1526 - protein, 9 aa, Artificial Sequence
  Synthetic
NSFTRGVYY

SEQ ID NO: 1527 - protein, 10 aa, Artificial Sequence
  Synthetic
GVYYPDKVFR

SEQ ID NO: 1528 - protein, 9 aa, Artificial Sequence
  Synthetic
KVFRSSVLH

SEQ ID NO: 1529 - protein, 9 aa, Artificial Sequence
  Synthetic
FRSSVLHST

SEQ ID NO: 1530 - protein, 9 aa, Artificial Sequence
  Synthetic
STQDLFLPF

SEQ ID NO: 1531 - protein, 9 aa, Artificial Sequence
  Synthetic
TQDLFLPFF

SEQ ID NO: 1532 - protein, 10 aa, Artificial Sequence
  Synthetic
FLPFFSNVTW

SEQ ID NO: 1533 - protein, 9 aa, Artificial Sequence
  Synthetic
PFFSNVTWF

SEQ ID NO: 1534 - protein, 9 aa, Artificial Sequence
  Synthetic
HVSGTNGTK

SEQ ID NO: 1535 - protein, 9 aa, Artificial Sequence
  Synthetic
LPFNDGVYF

SEQ ID NO: 1536 - protein, 10 aa, Artificial Sequence
  Synthetic
DGVYFASTEK

SEQ ID NO: 1537 - protein, 10 aa, Artificial Sequence
  Synthetic
WIFGTTLDSK

SEQ ID NO: 1538 - protein, 9 aa, Artificial Sequence
  Synthetic
CNDPFLGVY

SEQ ID NO: 1539 - protein, 9 aa, Artificial Sequence
  Synthetic
GVYYHKNNK

SEQ ID NO: 1540 - protein, 9 aa, Artificial Sequence
  Synthetic
YYHKNNKSW

SEQ ID NO: 1541 - protein, 9 aa, Artificial Sequence
  Synthetic
SWMESEFRV

SEQ ID NO: 1542 - protein, 10 aa, Artificial Sequence
  Synthetic
SWMESEFRVY

SEQ ID NO: 1543 - protein, 10 aa, Artificial Sequence
  Synthetic
VYSSANNCTF

SEQ ID NO: 1544 - protein, 9 aa, Artificial Sequence
  Synthetic
SANNCTFEY

SEQ ID NO: 1545 - protein, 10 aa, Artificial Sequence
  Synthetic
FEYVSQPFLM

SEQ ID NO: 1546 - protein, 9 aa, Artificial Sequence
  Synthetic
EYVSQPFLM

SEQ ID NO: 1547 - protein, 9 aa, Artificial Sequence
  Synthetic
FKNLREFVF

SEQ ID NO: 1548 - protein, 9 aa, Artificial Sequence
  Synthetic
VFKNIDGYF

SEQ ID NO: 1549 - protein, 9 aa, Artificial Sequence
  Synthetic
KIYSKHTPI

SEQ ID NO: 1550 - protein, 9 aa, Artificial Sequence
  Synthetic
LEPLVDLPI

SEQ ID NO: 1551 - protein, 10 aa, Artificial Sequence
  Synthetic
LPIGINITRF

SEQ ID NO: 1552 - protein, 9 aa, Artificial Sequence
  Synthetic
INITRFQTL

SEQ ID NO: 1553 - protein, 9 aa, Artificial Sequence
  Synthetic
GAAAYYVGY

SEQ ID NO: 1554 - protein, 10 aa, Artificial Sequence
  Synthetic
VGYLQPRTFL

SEQ ID NO: 1555 - protein, 10 aa, Artificial Sequence
  Synthetic
GYLQPRTFLL

SEQ ID NO: 1556 - protein, 10 aa, Artificial Sequence
  Synthetic
CALDPLSETK

SEQ ID NO: 1557 - protein, 9 aa, Artificial Sequence
  Synthetic
ALDPLSETK

SEQ ID NO: 1558 - protein, 10 aa, Artificial Sequence
  Synthetic
SETKCTLKSF

SEQ ID NO: 1559 - protein, 9 aa, Artificial Sequence
  Synthetic
ETKCTLKSF

SEQ ID NO: 1560 - protein, 9 aa, Artificial Sequence
  Synthetic
IYQTSNFRV

SEQ ID NO: 1561 - protein, 9 aa, Artificial Sequence
  Synthetic
QPTESIVRF

SEQ ID NO: 1562 - protein, 9 aa, Artificial Sequence
  Synthetic
GEVFNATRF

SEQ ID NO: 1563 - protein, 9 aa, Artificial Sequence
  Synthetic
NATRFASVY

SEQ ID NO: 1564 - protein, 9 aa, Artificial Sequence
  Synthetic
TRFASVYAW

SEQ ID NO: 1565 - protein, 10 aa, Artificial Sequence
  Synthetic
RFASVYAWNR

SEQ ID NO: 1566 - protein, 9 aa, Artificial Sequence
  Synthetic
FASVYAWNR

SEQ ID NO: 1567 - protein, 9 aa, Artificial Sequence
  Synthetic
SVYAWNRKR

SEQ ID NO: 1568 - protein, 9 aa, Artificial Sequence
  Synthetic
NSASFSTFK

SEQ ID NO: 1569 - protein, 10 aa, Artificial Sequence
  Synthetic
SASFSTFKCY

SEQ ID NO: 1570 - protein, 10 aa, Artificial Sequence
  Synthetic
KLNDLCFTNV

SEQ ID NO: 1571 - protein, 10 aa, Artificial Sequence
  Synthetic
NVYADSFVIR

SEQ ID NO: 1572 - protein, 9 aa, Artificial Sequence
  Synthetic
FVIRGDEVR

SEQ ID NO: 1573 - protein, 9 aa, Artificial Sequence
  Synthetic
QIAPGQTGK

SEQ ID NO: 1574 - protein, 10 aa, Artificial Sequence
  Synthetic
DSKVGGNYNY

SEQ ID NO: 1575 - protein, 10 aa, Artificial Sequence
  Synthetic
KVGGNYNYLY

SEQ ID NO: 1576 - protein, 9 aa, Artificial Sequence
  Synthetic
VGGNYNYLY

SEQ ID NO: 1577 - protein, 10 aa, Artificial Sequence
  Synthetic
GNYNYLYRLF

SEQ ID NO: 1578 - protein, 9 aa, Artificial Sequence
  Synthetic
YNYLYRLFR

SEQ ID NO: 1579 - protein, 9 aa, Artificial Sequence
  Synthetic
RLFRKSNLK

SEQ ID NO: 1580 - protein, 9 aa, Artificial Sequence
  Synthetic
KSNLKPFER

SEQ ID NO: 1581 - protein, 9 aa, Artificial Sequence
  Synthetic
FERDISTEI

SEQ ID NO: 1582 - protein, 10 aa, Artificial Sequence
  Synthetic
FERDISTEIY

SEQ ID NO: 1583 - protein, 9 aa, Artificial Sequence
  Synthetic
NGVEGFNCY

SEQ ID NO: 1584 - protein, 9 aa, Artificial Sequence
  Synthetic
YGFQPTNGV

SEQ ID NO: 1585 - protein, 9 aa, Artificial Sequence
  Synthetic
VGYQPYRVV

SEQ ID NO: 1586 - protein, 9 aa, Artificial Sequence
  Synthetic
YQPYRVVVL

SEQ ID NO: 1587 - protein, 10 aa, Artificial Sequence
  Synthetic
QPYRVVVLSF

SEQ ID NO: 1588 - protein, 10 aa, Artificial Sequence
  Synthetic
FELLHAPATV

SEQ ID NO: 1589 - protein, 9 aa, Artificial Sequence
  Synthetic
ELLHAPATV

SEQ ID NO: 1590 - protein, 9 aa, Artificial Sequence
  Synthetic
LVKNKCVNF

SEQ ID NO: 1591 - protein, 9 aa, Artificial Sequence
  Synthetic
VLTESNKKF

SEQ ID NO: 1592 - protein, 10 aa, Artificial Sequence
  Synthetic
KFLPFQQFGR

SEQ ID NO: 1593 - protein, 9 aa, Artificial Sequence
  Synthetic
DAVRDPQTL

SEQ ID NO: 1594 - protein, 10 aa, Artificial Sequence
  Synthetic
TPCSFGGVSV

SEQ ID NO: 1595 - protein, 10 aa, Artificial Sequence
  Synthetic
NTSNQVAVLY

SEQ ID NO: 1596 - protein, 9 aa, Artificial Sequence
  Synthetic
TSNQVAVLY

SEQ ID NO: 1597 - protein, 9 aa, Artificial Sequence
  Synthetic
YQDVNCTEV

SEQ ID NO: 1598 - protein, 10 aa, Artificial Sequence
  Synthetic
IHADQLTPTW

SEQ ID NO: 1599 - protein, 9 aa, Artificial Sequence
  Synthetic
QLTPTWRVY

SEQ ID NO: 1600 - protein, 9 aa, Artificial Sequence
  Synthetic
RVYSTGSNV

SEQ ID NO: 1601 - protein, 10 aa, Artificial Sequence
  Synthetic
RVYSTGSNVF

SEQ ID NO: 1602 - protein, 10 aa, Artificial Sequence
  Synthetic
STGSNVFQTR

SEQ ID NO: 1603 - protein, 9 aa, Artificial Sequence
  Synthetic
QTNSPRRAR

SEQ ID NO: 1604 - protein, 9 aa, Artificial Sequence
  Synthetic
RSVASQSII

SEQ ID NO: 1605 - protein, 9 aa, Artificial Sequence
  Synthetic
LGAENSVAY

SEQ ID NO: 1606 - protein, 9 aa, Artificial Sequence
  Synthetic
AYSNNSIAI

SEQ ID NO: 1607 - protein, 9 aa, Artificial Sequence
  Synthetic
NSIAIPTNF

SEQ ID NO: 1608 - protein, 9 aa, Artificial Sequence
  Synthetic
IAIPTNFTI

SEQ ID NO: 1609 - protein, 9 aa, Artificial Sequence
  Synthetic
IPTNFTISV

SEQ ID NO: 1610 - protein, 9 aa, Artificial Sequence
  Synthetic
FTISVTTEI

SEQ ID NO: 1611 - protein, 9 aa, Artificial Sequence
  Synthetic
EILPVSMTK

SEQ ID NO: 1612 - protein, 10 aa, Artificial Sequence
  Synthetic
KTSVDCTMYI

SEQ ID NO: 1613 - protein, 9 aa, Artificial Sequence
  Synthetic
GSFCTQLNR

SEQ ID NO: 1614 - protein, 10 aa, Artificial Sequence
  Synthetic
TQLNRALTGI

SEQ ID NO: 1615 - protein, 9 aa, Artificial Sequence
  Synthetic
EVFAQVKQI

SEQ ID NO: 1616 - protein, 10 aa, Artificial Sequence
  Synthetic
EVFAQVKQIY

SEQ ID NO: 1617 - protein, 9 aa, Artificial Sequence
  Synthetic
VFAQVKQIY

SEQ ID NO: 1618 - protein, 10 aa, Artificial Sequence
  Synthetic
IYKTPPIKDF

SEQ ID NO: 1619 - protein, 10 aa, Artificial Sequence
  Synthetic
ILPDPSKPSK

SEQ ID NO: 1620 - protein, 9 aa, Artificial Sequence
  Synthetic
TLADAGFIK

SEQ ID NO: 1621 - protein, 10 aa, Artificial Sequence
  Synthetic
LADAGFIKQY

SEQ ID NO: 1622 - protein, 9 aa, Artificial Sequence
  Synthetic
ADAGFIKQY

SEQ ID NO: 1623 - protein, 9 aa, Artificial Sequence
  Synthetic
GLTVLPPLL

SEQ ID NO: 1624 - protein, 9 aa, Artificial Sequence
  Synthetic
LPPLLTDEM

SEQ ID NO: 1625 - protein, 10 aa, Artificial Sequence
  Synthetic
LLTDEMIAQY

SEQ ID NO: 1626 - protein, 10 aa, Artificial Sequence
  Synthetic
LTDEMIAQYT

SEQ ID NO: 1627 - protein, 9 aa, Artificial Sequence
  Synthetic
WTFGAGAAL

SEQ ID NO: 1628 - protein, 10 aa, Artificial Sequence
  Synthetic
QIPFAMQMAY

SEQ ID NO: 1629 - protein, 9 aa, Artificial Sequence
  Synthetic
IPFAMQMAY

SEQ ID NO: 1630 - protein, 9 aa, Artificial Sequence
  Synthetic
FAMQMAYRF

SEQ ID NO: 1631 - protein, 9 aa, Artificial Sequence
  Synthetic
IANQFNSAI

SEQ ID NO: 1632 - protein, 10 aa, Artificial Sequence
  Synthetic
LSSTASALGK

SEQ ID NO: 1633 - protein, 9 aa, Artificial Sequence
  Synthetic
ALNTLVKQL

SEQ ID NO: 1634 - protein, 9 aa, Artificial Sequence
  Synthetic
SVLNDILSR

SEQ ID NO: 1635 - protein, 10 aa, Artificial Sequence
  Synthetic
SVLNDILSRL

SEQ ID NO: 1636 - protein, 9 aa, Artificial Sequence
  Synthetic
AEVQIDRLI

SEQ ID NO: 1637 - protein, 9 aa, Artificial Sequence
  Synthetic
LITGRLQSL

SEQ ID NO: 1638 - protein, 9 aa, Artificial Sequence
  Synthetic
AEIRASANL

SEQ ID NO: 1639 - protein, 10 aa, Artificial Sequence
  Synthetic
RASANLAATK

SEQ ID NO: 1640 - protein, 9 aa, Artificial Sequence
  Synthetic
RVDFCGKGY

SEQ ID NO: 1641 - protein, 9 aa, Artificial Sequence
  Synthetic
FPQSAPHGV

SEQ ID NO: 1642 - protein, 9 aa, Artificial Sequence
  Synthetic
QSAPHGVVF

SEQ ID NO: 1643 - protein, 9 aa, Artificial Sequence
  Synthetic
GVVFLHVTY

SEQ ID NO: 1644 - protein, 10 aa, Artificial Sequence
  Synthetic
HVTYVPAQEK

SEQ ID NO: 1645 - protein, 9 aa, Artificial Sequence
  Synthetic
VTYVPAQEK

SEQ ID NO: 1646 - protein, 10 aa, Artificial Sequence
  Synthetic
GVFVSNGTHW

SEQ ID NO: 1647 - protein, 9 aa, Artificial Sequence
  Synthetic
VFVSNGTHW

SEQ ID NO: 1648 - protein, 10 aa, Artificial Sequence
  Synthetic
VFVSNGTHWF

SEQ ID NO: 1649 - protein, 9 aa, Artificial Sequence
  Synthetic
FVSNGTHWF

SEQ ID NO: 1650 - protein, 9 aa, Artificial Sequence
  Synthetic
HWFVTQRNF

SEQ ID NO: 1651 - protein, 9 aa, Artificial Sequence
  Synthetic
WFVTQRNFY

SEQ ID NO: 1652 - protein, 9 aa, Artificial Sequence
  Synthetic
IITTDNTFV

SEQ ID NO: 1653 - protein, 10 aa, Artificial Sequence
  Synthetic
DSFKEELDKY

SEQ ID NO: 1654 - protein, 9 aa, Artificial Sequence
  Synthetic
SFKEELDKY

SEQ ID NO: 1655 - protein, 9 aa, Artificial Sequence
  Synthetic
NASVVNIQK

SEQ ID NO: 1656 - protein, 9 aa, Artificial Sequence
  Synthetic
KEIDRLNEV

SEQ ID NO: 1657 - protein, 10 aa, Artificial Sequence
  Synthetic
NESLIDLQEL

SEQ ID NO: 1658 - protein, 10 aa, Artificial Sequence
  Synthetic
LQELGKYEQY

SEQ ID NO: 1659 - protein, 9 aa, Artificial Sequence
  Synthetic
QELGKYEQY

SEQ ID NO: 1660 - protein, 9 aa, Artificial Sequence
  Synthetic
YEQYIKWPW

SEQ ID NO: 1661 - protein, 10 aa, Artificial Sequence
  Synthetic
QYIKWPWYIW

SEQ ID NO: 1662 - protein, 10 aa, Artificial Sequence
  Synthetic
CMTSCCSCLK

SEQ ID NO: 1663 - protein, 10 aa, Artificial Sequence
  Synthetic
FDEDDSEPVL

SEQ ID NO: 1664 - protein, 9 aa, Artificial Sequence
  Synthetic
EPVLKGVKL

SEQ ID NO: 1665 - protein, 9 aa, Artificial Sequence
  Synthetic
VLKGVKLHY

SEQ ID NO: 1666 - protein, 9 aa, Artificial Sequence
  Synthetic
SLVKPSFYV

SEQ ID NO: 1667 - protein, 9 aa, Artificial Sequence
  Synthetic
YVYSRVKNL

SEQ ID NO: 1668 - protein, 9 aa, Artificial Sequence
  Synthetic
GTITVEELK

SEQ ID NO: 1669 - protein, 9 aa, Artificial Sequence
  Synthetic
KLLEQWNLV

SEQ ID NO: 1670 - protein, 9 aa, Artificial Sequence
  Synthetic
FLFLTWICL

SEQ ID NO: 1671 - protein, 9 aa, Artificial Sequence
  Synthetic
NRFLYIIKL

SEQ ID NO: 1672 - protein, 10 aa, Artificial Sequence
  Synthetic
TLACFVLAAV

SEQ ID NO: 1673 - protein, 9 aa, Artificial Sequence
  Synthetic
FVLAAVYRI

SEQ ID NO: 1674 - protein, 10 aa, Artificial Sequence
  Synthetic
RLFARTRSMW

SEQ ID NO: 1675 - protein, 9 aa, Artificial Sequence
  Synthetic
SMWSFNPET

SEQ ID NO: 1676 - protein, 10 aa, Artificial Sequence
  Synthetic
SELVIGAVIL

SEQ ID NO: 1677 - protein, 9 aa, Artificial Sequence
  Synthetic
AVILRGHLR

SEQ ID NO: 1678 - protein, 9 aa, Artificial Sequence
  Synthetic
ATSRTLSYY

SEQ ID NO: 1679 - protein, 10 aa, Artificial Sequence
  Synthetic
ATSRTLSYYK

SEQ ID NO: 1680 - protein, 9 aa, Artificial Sequence
  Synthetic
RYRIGNYKL

SEQ ID NO: 1681 - protein, 9 aa, Artificial Sequence
  Synthetic
QRNAPRITF

SEQ ID NO: 1682 - protein, 9 aa, Artificial Sequence
  Synthetic
NTASWFTAL

SEQ ID NO: 1683 - protein, 10 aa, Artificial Sequence
  Synthetic
KFPRGQGVPI

SEQ ID NO: 1684 - protein, 9 aa, Artificial Sequence
  Synthetic
FPRGQGVPI

SEQ ID NO: 1685 - protein, 10 aa, Artificial Sequence
  Synthetic
YYRRATRRIR

SEQ ID NO: 1686 - protein, 10 aa, Artificial Sequence
  Synthetic
RIRGGDGKMK

SEQ ID NO: 1687 - protein, 9 aa, Artificial Sequence
  Synthetic
KMKDLSPRW

SEQ ID NO: 1688 - protein, 10 aa, Artificial Sequence
  Synthetic
LSPRWYFYYL

SEQ ID NO: 1689 - protein, 9 aa, Artificial Sequence
  Synthetic
SPRWYFYYL

SEQ ID NO: 1690 - protein, 10 aa, Artificial Sequence
  Synthetic
GTGPEAGLPY

SEQ ID NO: 1691 - protein, 10 aa, Artificial Sequence
  Synthetic
ATEGALNTPK

SEQ ID NO: 1692 - protein, 10 aa, Artificial Sequence
  Synthetic
NPANNAAIVL

SEQ ID NO: 1693 - protein, 10 aa, Artificial Sequence
  Synthetic
VLQLPQGTTL

SEQ ID NO: 1694 - protein, 9 aa, Artificial Sequence
  Synthetic
LALLLLDRL

SEQ ID NO: 1695 - protein, 10 aa, Artificial Sequence
  Synthetic
LLLLDRLNQL

SEQ ID NO: 1696 - protein, 9 aa, Artificial Sequence
  Synthetic
LLLDRLNQL

SEQ ID NO: 1697 - protein, 10 aa, Artificial Sequence
  Synthetic
QQQQGQTVTK

SEQ ID NO: 1698 - protein, 9 aa, Artificial Sequence
  Synthetic
KPRQKRTAT

SEQ ID NO: 1699 - protein, 9 aa, Artificial Sequence
  Synthetic
KAYNVTQAF

SEQ ID NO: 1700 - protein, 9 aa, Artificial Sequence
  Synthetic
AQFAPSASA

SEQ ID NO: 1701 - protein, 10 aa, Artificial Sequence
  Synthetic
AQFAPSASAF

SEQ ID NO: 1702 - protein, 9 aa, Artificial Sequence
  Synthetic
ASAFFGMSR

SEQ ID NO: 1703 - protein, 9 aa, Artificial Sequence
  Synthetic
GMSRIGMEV

SEQ ID NO: 1704 - protein, 9 aa, Artificial Sequence
  Synthetic
MEVTPSGTW

SEQ ID NO: 1705 - protein, 10 aa, Artificial Sequence
  Synthetic
MEVTPSGTWL

SEQ ID NO: 1706 - protein, 9 aa, Artificial Sequence
  Synthetic
ILLNKHIDA

SEQ ID NO: 1707 - protein, 9 aa, Artificial Sequence
  Synthetic
KTFPPTEPK

SEQ ID NO: 1708 - protein, 10 aa, Artificial Sequence
  Synthetic
KTFPPTEPKK

SEQ ID NO: 1709 - protein, 9 aa, Artificial Sequence
  Synthetic
LPAADLDDF

SEQ ID NO: 1710 - protein, 9 aa, Artificial Sequence
  Synthetic
FSKQLQQSM

SEQ ID NO: 1711 - protein, 9 aa, Artificial Sequence
  Synthetic
VLSEARQHL

SEQ ID NO: 1712 - protein, 10 aa, Artificial Sequence
  Synthetic
TVLSFCAFAV

SEQ ID NO: 1713 - protein, 9 aa, Artificial Sequence
  Synthetic
DLKGKYVQI

SEQ ID NO: 1714 - protein, 10 aa, Artificial Sequence
  Synthetic
YTMADLVYAL

SEQ ID NO: 1715 - protein, 9 aa, Artificial Sequence
  Synthetic
TMADLVYAL

SEQ ID NO: 1716 - protein, 9 aa, Artificial Sequence
  Synthetic
LLMPILTLT

SEQ ID NO: 1717 - protein, 9 aa, Artificial Sequence
  Synthetic
KLFDRYFKY

SEQ ID NO: 1718 - protein, 9 aa, Artificial Sequence
  Synthetic
FVDGVPFVV

SEQ ID NO: 1719 - protein, 9 aa, Artificial Sequence
  Synthetic
ISDYDYYRY

SEQ ID NO: 1720 - protein, 9 aa, Artificial Sequence
  Synthetic
RQLLFVVEV

SEQ ID NO: 1721 - protein, 9 aa, Artificial Sequence
  Synthetic
VVDKYFDCY

SEQ ID NO: 1722 - protein, 9 aa, Artificial Sequence
  Synthetic
RLYYDSMSY

SEQ ID NO: 1723 - protein, 10 aa, Artificial Sequence
  Synthetic
MVMCGGSLYV

SEQ ID NO: 1724 - protein, 9 aa, Artificial Sequence
  Synthetic
DTDFVNEFY

SEQ ID NO: 1725 - protein, 9 aa, Artificial Sequence
  Synthetic
FYAYLRKHF

SEQ ID NO: 1726 - protein, 9 aa, Artificial Sequence
  Synthetic
RILGAGCFV

SEQ ID NO: 1727 - protein, 9 aa, Artificial Sequence
  Synthetic
LMIERFVSL

SEQ ID NO: 1728 - protein, 9 aa, Artificial Sequence
  Synthetic
LYLQYIRKL

SEQ ID NO: 1729 - protein, 9 aa, Artificial Sequence
  Synthetic
VLQAVGACV

SEQ ID NO: 1730 - protein, 9 aa, Artificial Sequence
  Synthetic
LVLSVNPYV

SEQ ID NO: 1731 - protein, 9 aa, Artificial Sequence
  Synthetic
KLFAAETLK

SEQ ID NO: 1732 - protein, 9 aa, Artificial Sequence
  Synthetic
KLSYGIATV

SEQ ID NO: 1733 - protein, 9 aa, Artificial Sequence
  Synthetic
VVYRGTTTY

SEQ ID NO: 1734 - protein, 10 aa, Artificial Sequence
  Synthetic
VVYRGTTTYK

SEQ ID NO: 1735 - protein, 10 aa, Artificial Sequence
  Synthetic
VYRGTTTYKL

SEQ ID NO: 1736 - protein, 9 aa, Artificial Sequence
  Synthetic
KLNVGDYFV

SEQ ID NO: 1737 - protein, 9 aa, Artificial Sequence
  Synthetic
SSNVANYQK

SEQ ID NO: 1738 - protein, 9 aa, Artificial Sequence
  Synthetic
VYIGDPAQL

SEQ ID NO: 1739 - protein, 9 aa, Artificial Sequence
  Synthetic
IVDTVSALV

SEQ ID NO: 1740 - protein, 9 aa, Artificial Sequence
  Synthetic
IPRRNVATL

SEQ ID NO: 1741 - protein, 9 aa, Artificial Sequence
  Synthetic
VLWAHGFEL

SEQ ID NO: 1742 - protein, 9 aa, Artificial Sequence
  Synthetic
TYACWHHSI

SEQ ID NO: 1743 - protein, 9 aa, Artificial Sequence
  Synthetic
AIMTRCLAV

SEQ ID NO: 1744 - protein, 10 aa, Artificial Sequence
  Synthetic
IEYPIIGDEL

SEQ ID NO: 1745 - protein, 9 aa, Artificial Sequence
  Synthetic
ALLADKFPV

SEQ ID NO: 1746 - protein, 9 aa, Artificial Sequence
  Synthetic
SYATHSDKF

SEQ ID NO: 1747 - protein, 9 aa, Artificial Sequence
  Synthetic
YLDAYNMMI

SEQ ID NO: 1748 - protein, 9 aa, Artificial Sequence
  Synthetic
MMISAGFSL

SEQ ID NO: 1749 - protein, 9 aa, Artificial Sequence
  Synthetic
KQFDTYNLW

SEQ ID NO: 1750 - protein, 9 aa, Artificial Sequence
  Synthetic
NLWNTFTRL

SEQ ID NO: 1751 - protein, 9 aa, Artificial Sequence
  Synthetic
KVDGVDVEL

SEQ ID NO: 1752 - protein, 10 aa, Artificial Sequence
  Synthetic
LLLDDFVEII

SEQ ID NO: 1753 - protein, 9 aa, Artificial Sequence
  Synthetic
MLWCKDGHV

SEQ ID NO: 1754 - protein, 9 aa, Artificial Sequence
  Synthetic
GVAMPNLYK

SEQ ID NO: 1755 - protein, 9 aa, Artificial Sequence
  Synthetic
KMQRMLLEK

SEQ ID NO: 1756 - protein, 9 aa, Artificial Sequence
  Synthetic
YLNTLTLAV

SEQ ID NO: 1757 - protein, 9 aa, Artificial Sequence
  Synthetic
TLIGDCATV

SEQ ID NO: 1758 - protein, 9 aa, Artificial Sequence
  Synthetic
KTIQPRVEK

SEQ ID NO: 1759 - protein, 9 aa, Artificial Sequence
  Synthetic
KLVNKFLAL

SEQ ID NO: 1760 - protein, 9 aa, Artificial Sequence
  Synthetic
VTNNTFTLK

SEQ ID NO: 1761 - protein, 9 aa, Artificial Sequence
  Synthetic
FGDDTVIEV

SEQ ID NO: 1762 - protein, 9 aa, Artificial Sequence
  Synthetic
PTDNYITTY

SEQ ID NO: 1763 - protein, 9 aa, Artificial Sequence
  Synthetic
QEILGTVSW

SEQ ID NO: 1764 - protein, 10 aa, Artificial Sequence
  Synthetic
TTDPSFLGRY

SEQ ID NO: 1765 - protein, 9 aa, Artificial Sequence
  Synthetic
YLATALLTL

SEQ ID NO: 1766 - protein, 9 aa, Artificial Sequence
  Synthetic
SAPPAQYEL

SEQ ID NO: 1767 - protein, 9 aa, Artificial Sequence
  Synthetic
NYMPYFFTL

SEQ ID NO: 1768 - protein, 9 aa, Artificial Sequence
  Synthetic
ASMPTTIAK

SEQ ID NO: 1769 - protein, 9 aa, Artificial Sequence
  Synthetic
ILFTRFFYV

SEQ ID NO: 1770 - protein, 9 aa, Artificial Sequence
  Synthetic
YIFFASFYY

SEQ ID NO: 1771 - protein, 10 aa, Artificial Sequence
  Synthetic
QLMCQPILLL

SEQ ID NO: 1772 - protein, 9 aa, Artificial Sequence
  Synthetic
STFNVPMEK

SEQ ID NO: 1773 - protein, 9 aa, Artificial Sequence
  Synthetic
FLPRVFSAV

SEQ ID NO: 1774 - protein, 9 aa, Artificial Sequence
  Synthetic
FSAVGNICY

SEQ ID NO: 1775 - protein, 10 aa, Artificial Sequence
  Synthetic
SLRPDTRYVL

SEQ ID NO: 1776 - protein, 9 aa, Artificial Sequence
  Synthetic
FLLNKEMYL

SEQ ID NO: 1777 - protein, 10 aa, Artificial Sequence
  Synthetic
TSEDMLNPNY

SEQ ID NO: 1778 - protein, 9 aa, Artificial Sequence
  Synthetic
TPKYKFVRI

SEQ ID NO: 1779 - protein, 9 aa, Artificial Sequence
  Synthetic
VRIQPGQTF

SEQ ID NO: 1780 - protein, 9 aa, Artificial Sequence
  Synthetic
FLNGSCGSV

SEQ ID NO: 1781 - protein, 9 aa, Artificial Sequence
  Synthetic
GTDLEGNFY

SEQ ID NO: 1782 - protein, 9 aa, Artificial Sequence
  Synthetic
VLAWLYAAV

SEQ ID NO: 1783 - protein, 9 aa, Artificial Sequence
  Synthetic
FLNRFTTTL

SEQ ID NO: 1784 - protein, 9 aa, Artificial Sequence
  Synthetic
SAFAMMFVK

SEQ ID NO: 1785 - protein, 9 aa, Artificial Sequence
  Synthetic
FLLPSLATV

SEQ ID NO: 1786 - protein, 9 aa, Artificial Sequence
  Synthetic
MPASWVMRI

SEQ ID NO: 1787 - protein, 9 aa, Artificial Sequence
  Synthetic
KLKDCVMYA

SEQ ID NO: 1788 - protein, 9 aa, Artificial Sequence
  Synthetic
SMWALIISV

SEQ ID NO: 1789 - protein, 9 aa, Artificial Sequence
  Synthetic
KLWAQCVQL

SEQ ID NO: 1790 - protein, 9 aa, Artificial Sequence
  Synthetic
SEFSSLPSY

SEQ ID NO: 1791 - protein, 10 aa, Artificial Sequence
  Synthetic
NTCDGTTFTY

SEQ ID NO: 1792 - protein, 10 aa, Artificial Sequence
  Synthetic
FTYASALWEI

SEQ ID NO: 1793 - protein, 10 aa, Artificial Sequence
  Synthetic
SALWEIQQVV

SEQ ID NO: 1794 - protein, 9 aa, Artificial Sequence
  Synthetic
ALWEIQQVV

SEQ ID NO: 1795 - protein, 9 aa, Artificial Sequence
  Synthetic
ALRANSAVK

SEQ ID NO: 1796 - protein, 9 aa, Artificial Sequence
  Synthetic
CTDDNALAY

SEQ ID NO: 1797 - protein, 10 aa, Artificial Sequence
  Synthetic
CTDDNALAYY

SEQ ID NO: 1798 - protein, 10 aa, Artificial Sequence
  Synthetic
YTELEPPCRF

SEQ ID NO: 1799 - protein, 9 aa, Artificial Sequence
  Synthetic
VTDTPKGPK

SEQ ID NO: 1800 - protein, 10 aa, Artificial Sequence
  Synthetic
MDLFMRIFTI

SEQ ID NO: 1801 - protein, 10 aa, Artificial Sequence
  Synthetic
FVRATATIPI

SEQ ID NO: 1802 - protein, 9 aa, Artificial Sequence
  Synthetic
IPIQASLPF

SEQ ID NO: 1803 - protein, 10 aa, Artificial Sequence
  Synthetic
IVGVALLAVF

SEQ ID NO: 1804 - protein, 9 aa, Artificial Sequence
  Synthetic
ALSKGVHFV

SEQ ID NO: 1805 - protein, 9 aa, Artificial Sequence
  Synthetic
YLYALVYFL

SEQ ID NO: 1806 - protein, 9 aa, Artificial Sequence
  Synthetic
VYFLQSINF

SEQ ID NO: 1807 - protein, 9 aa, Artificial Sequence
  Synthetic
LLYDANYFL

SEQ ID NO: 1808 - protein, 9 aa, Artificial Sequence
  Synthetic
FTSDYYQLY

SEQ ID NO: 1809 - protein, 9 aa, Artificial Sequence
  Synthetic
YYQLYSTQL

SEQ ID NO: 1810 - protein, 9 aa, Artificial Sequence
  Synthetic
HLVDFQVTI

SEQ ID NO: 1811 - protein, 10 aa, Artificial Sequence
  Synthetic
QLRARSVSPK

SEQ ID NO: 1812 - protein, 9 aa, Artificial Sequence
  Synthetic
RARSVSPKL

SEQ ID NO: 1813 - protein, 9 aa, Artificial Sequence
  Synthetic
KLFIRQEEV

SEQ ID NO: 1814 - protein, 10 aa, Artificial Sequence
  Synthetic
VFITLCFTLK

SEQ ID NO: 1815 - protein, 10 aa, Artificial Sequence
  Synthetic
IMLIIFWFSL

SEQ ID NO: 1816 - protein, 9 aa, Artificial Sequence
  Synthetic
IQYIDIGNY

SEQ ID NO: 1817 - protein, 9 aa, Artificial Sequence
  Synthetic
KLGSLVVRC

SEQ ID NO: 1818 - protein, 10 aa, Artificial Sequence
  Synthetic
LEYHDVRVVL

SEQ ID NO: 1819 - protein, 9 aa, Artificial Sequence
  Synthetic
SEETGTLIV

SEQ ID NO: 1820 - protein, 9 aa, Artificial Sequence
  Synthetic
FLLVTLAIL

SEQ ID NO: 1821 - protein, 9 aa, Artificial Sequence
  Synthetic
LVKPSFYVY

SEQ ID NO: 1822 - protein, 10 aa, Artificial Sequence
  Synthetic
FYVYSRVKNL

SEQ ID NO: 1823 - protein, 10 aa, Artificial Sequence
  Synthetic
NGTITVEELK

SEQ ID NO: 1824 - protein, 9 aa, Artificial Sequence
  Synthetic
WICLLQFAY

SEQ ID NO: 1825 - protein, 9 aa, Artificial Sequence
  Synthetic
FAYANRNRF

SEQ ID NO: 1826 - protein, 9 aa, Artificial Sequence
  Synthetic
AYANRNRFL

SEQ ID NO: 1827 - protein, 9 aa, Artificial Sequence
  Synthetic
YANRNRFLY

SEQ ID NO: 1828 - protein, 9 aa, Artificial Sequence
  Synthetic
ANRNRFLYI

SEQ ID NO: 1829 - protein, 9 aa, Artificial Sequence
  Synthetic
RNRFLYIIK

SEQ ID NO: 1830 - protein, 10 aa, Artificial Sequence
  Synthetic
RNRFLYIIKL

SEQ ID NO: 1831 - protein, 10 aa, Artificial Sequence
  Synthetic
RFLYIIKLIF

SEQ ID NO: 1832 - protein, 10 aa, Artificial Sequence
  Synthetic
FLWLLWPVTL

SEQ ID NO: 1833 - protein, 9 aa, Artificial Sequence
  Synthetic
WLLWPVTLA

SEQ ID NO: 1834 - protein, 9 aa, Artificial Sequence
  Synthetic
LLWPVTLAC

SEQ ID NO: 1835 - protein, 9 aa, Artificial Sequence
  Synthetic
LAAVYRINW

SEQ ID NO: 1836 - protein, 10 aa, Artificial Sequence
  Synthetic
LAAVYRINWI

SEQ ID NO: 1837 - protein, 9 aa, Artificial Sequence
  Synthetic
MACLVGLMW

SEQ ID NO: 1838 - protein, 9 aa, Artificial Sequence
  Synthetic
GLMWLSYFI

SEQ ID NO: 1839 - protein, 9 aa, Artificial Sequence
  Synthetic
LSYFIASFR

SEQ ID NO: 1840 - protein, 9 aa, Artificial Sequence
  Synthetic
IASFRLFAR

SEQ ID NO: 1841 - protein, 10 aa, Artificial Sequence
  Synthetic
FRLFARTRSM

SEQ ID NO: 1842 - protein, 9 aa, Artificial Sequence
  Synthetic
RLFARTRSM

SEQ ID NO: 1843 - protein, 9 aa, Artificial Sequence
  Synthetic
SFNPETNIL

SEQ ID NO: 1844 - protein, 9 aa, Artificial Sequence
  Synthetic
SELVIGAVI

SEQ ID NO: 1845 - protein, 10 aa, Artificial Sequence
  Synthetic
ELVIGAVILR

SEQ ID NO: 1846 - protein, 9 aa, Artificial Sequence
  Synthetic
LVIGAVILR

SEQ ID NO: 1847 - protein, 9 aa, Artificial Sequence
  Synthetic
HLRIAGHHL

SEQ ID NO: 1848 - protein, 9 aa, Artificial Sequence
  Synthetic
RIAGHHLGR

SEQ ID NO: 1849 - protein, 9 aa, Artificial Sequence
  Synthetic
LPKEITVAT

SEQ ID NO: 1850 - protein, 10 aa, Artificial Sequence
  Synthetic
TVATSRTLSY

SEQ ID NO: 1851 - protein, 9 aa, Artificial Sequence
  Synthetic
VATSRTLSY

SEQ ID NO: 1852 - protein, 10 aa, Artificial Sequence
  Synthetic
VATSRTLSYY

SEQ ID NO: 1853 - protein, 10 aa, Artificial Sequence
  Synthetic
SQRVAGDSGF

SEQ ID NO: 1854 - protein, 9 aa, Artificial Sequence
  Synthetic
AGDSGFAAY

SEQ ID NO: 1855 - protein, 9 aa, Artificial Sequence
  Synthetic
DSGFAAYSR

SEQ ID NO: 1856 - protein, 10 aa, Artificial Sequence
  Synthetic
YSRYRIGNYK

SEQ ID NO: 1857 - protein, 9 aa, Artificial Sequence
  Synthetic
SSSDNIALL

SEQ ID NO: 1858 - protein, 10 aa, Artificial Sequence
  Synthetic
RPQGLPNNTA

SEQ ID NO: 1859 - protein, 10 aa, Artificial Sequence
  Synthetic
QGLPNNTASW

SEQ ID NO: 1860 - protein, 9 aa, Artificial Sequence
  Synthetic
LPNNTASWF

SEQ ID NO: 1861 - protein, 9 aa, Artificial Sequence
  Synthetic
SPDDQIGYY

SEQ ID NO: 1862 - protein, 9 aa, Artificial Sequence
  Synthetic
MKDLSPRWY

SEQ ID NO: 1863 - protein, 10 aa, Artificial Sequence
  Synthetic
YLGTGPEAGL

SEQ ID NO: 1864 - protein, 9 aa, Artificial Sequence
  Synthetic
AGLPYGANK

SEQ ID NO: 1865 - protein, 10 aa, Artificial Sequence
  Synthetic
LPYGANKDGI

SEQ ID NO: 1866 - protein, 10 aa, Artificial Sequence
  Synthetic
YGANKDGIIW

SEQ ID NO: 1867 - protein, 9 aa, Artificial Sequence
  Synthetic
IIWVATEGA

SEQ ID NO: 1868 - protein, 9 aa, Artificial Sequence
  Synthetic
GTRNPANNA

SEQ ID NO: 1869 - protein, 10 aa, Artificial Sequence
  Synthetic
AEGSRGGSQA

SEQ ID NO: 1870 - protein, 10 aa, Artificial Sequence
  Synthetic
SQASSRSSSR

SEQ ID NO: 1871 - protein, 9 aa, Artificial Sequence
  Synthetic
SSRGTSPAR

SEQ ID NO: 1872 - protein, 9 aa, Artificial Sequence
  Synthetic
KSAAEASKK

SEQ ID NO: 1873 - protein, 9 aa, Artificial Sequence
  Synthetic
RTATKAYNV

SEQ ID NO: 1874 - protein, 10 aa, Artificial Sequence
  Synthetic
QELIRQGTDY

SEQ ID NO: 1875 - protein, 9 aa, Artificial Sequence
  Synthetic
ELIRQGTDY

SEQ ID NO: 1876 - protein, 10 aa, Artificial Sequence
  Synthetic
QFAPSASAFF

SEQ ID NO: 1877 - protein, 9 aa, Artificial Sequence
  Synthetic
FAPSASAFF

SEQ ID NO: 1878 - protein, 10 aa, Artificial Sequence
  Synthetic
APSASAFFGM

SEQ ID NO: 1879 - protein, 10 aa, Artificial Sequence
  Synthetic
SASAFFGMSR

SEQ ID NO: 1880 - protein, 10 aa, Artificial Sequence
  Synthetic
VTPSGTWLTY

SEQ ID NO: 1881 - protein, 9 aa, Artificial Sequence
  Synthetic
TPSGTWLTY

SEQ ID NO: 1882 - protein, 9 aa, Artificial Sequence
  Synthetic
KLDDKDPNF

SEQ ID NO: 1883 - protein, 9 aa, Artificial Sequence
  Synthetic
LLNKHIDAY

SEQ ID NO: 1884 - protein, 10 aa, Artificial Sequence
  Synthetic
YKTFPPTEPK

SEQ ID NO: 1885 - protein, 9 aa, Artificial Sequence
  Synthetic
KKQQTVTLL

SEQ ID NO: 1886 - protein, 9 aa, Artificial Sequence
  Synthetic
HLKDGTCGL

SEQ ID NO: 1887 - protein, 10 aa, Artificial Sequence
  Synthetic
APHGHVMVEL

SEQ ID NO: 1888 - protein, 9 aa, Artificial Sequence
  Synthetic
VMVELVAEL

SEQ ID NO: 1889 - protein, 9 aa, Artificial Sequence
  Synthetic
VPHVGEIPV

SEQ ID NO: 1890 - protein, 9 aa, Artificial Sequence
  Synthetic
HVGEIPVAY

SEQ ID NO: 1891 - protein, 10 aa, Artificial Sequence
  Synthetic
IPVAYRKVLL

SEQ ID NO: 1892 - protein, 10 aa, Artificial Sequence
  Synthetic
VPANSTVLSF

SEQ ID NO: 1893 - protein, 9 aa, Artificial Sequence
  Synthetic
YLASGGQPI

SEQ ID NO: 1894 - protein, 9 aa, Artificial Sequence
  Synthetic
VVYRAFDIY

SEQ ID NO: 1895 - protein, 9 aa, Artificial Sequence
  Synthetic
KVAGFAKFL

SEQ ID NO: 1896 - protein, 10 aa, Artificial Sequence
  Synthetic
KVAGFAKFLK

SEQ ID NO: 1897 - protein, 9 aa, Artificial Sequence
  Synthetic
NLIDSYFVV

SEQ ID NO: 1898 - protein, 9 aa, Artificial Sequence
  Synthetic
YFVVKRHTF

SEQ ID NO: 1899 - protein, 9 aa, Artificial Sequence
  Synthetic
VPHISRQRL

SEQ ID NO: 1900 - protein, 9 aa, Artificial Sequence
  Synthetic
TLKEILVTY

SEQ ID NO: 1901 - protein, 10 aa, Artificial Sequence
  Synthetic
FVENPDILRV

SEQ ID NO: 1902 - protein, 9 aa, Artificial Sequence
  Synthetic
VENPDILRV

SEQ ID NO: 1903 - protein, 10 aa, Artificial Sequence
  Synthetic
VENPDILRVY

SEQ ID NO: 1904 - protein, 9 aa, Artificial Sequence
  Synthetic
VRQALLKTV

SEQ ID NO: 1905 - protein, 9 aa, Artificial Sequence
  Synthetic
DAMRNAGIV

SEQ ID NO: 1906 - protein, 9 aa, Artificial Sequence
  Synthetic
SLLMPILTL

SEQ ID NO: 1907 - protein, 10 aa, Artificial Sequence
  Synthetic
HVDTDLTKPY

SEQ ID NO: 1908 - protein, 9 aa, Artificial Sequence
  Synthetic
KPYIKWDLL

SEQ ID NO: 1909 - protein, 10 aa, Artificial Sequence
  Synthetic
RYFKYWDQTY

SEQ ID NO: 1910 - protein, 9 aa, Artificial Sequence
  Synthetic
ILHCANFNV

SEQ ID NO: 1911 - protein, 9 aa, Artificial Sequence
  Synthetic
STVFPPTSF

SEQ ID NO: 1912 - protein, 9 aa, Artificial Sequence
  Synthetic
FPPTSFGPL

SEQ ID NO: 1913 - protein, 9 aa, Artificial Sequence
  Synthetic
TSFGPLVRK

SEQ ID NO: 1914 - protein, 9 aa, Artificial Sequence
  Synthetic
SFGPLVRKI

SEQ ID NO: 1915 - protein, 10 aa, Artificial Sequence
  Synthetic
KIFVDGVPFV

SEQ ID NO: 1916 - protein, 10 aa, Artificial Sequence
  Synthetic
FVVSTGYHFR

SEQ ID NO: 1917 - protein, 9 aa, Artificial Sequence
  Synthetic
VVSTGYHFR

SEQ ID NO: 1918 - protein, 9 aa, Artificial Sequence
  Synthetic
NLHSSRLSF

SEQ ID NO: 1919 - protein, 10 aa, Artificial Sequence
  Synthetic
QTVKPGNFNK

SEQ ID NO: 1920 - protein, 9 aa, Artificial Sequence
  Synthetic
FAVSKGFFK

SEQ ID NO: 1921 - protein, 9 aa, Artificial Sequence
  Synthetic
AAISDYDYY

SEQ ID NO: 1922 - protein, 10 aa, Artificial Sequence
  Synthetic
AAISDYDYYR

SEQ ID NO: 1923 - protein, 9 aa, Artificial Sequence
  Synthetic
AISDYDYYR

SEQ ID NO: 1924 - protein, 9 aa, Artificial Sequence
  Synthetic
YRYNLPTMC

SEQ ID NO: 1925 - protein, 9 aa, Artificial Sequence
  Synthetic
FVVEVVDKY

SEQ ID NO: 1926 - protein, 9 aa, Artificial Sequence
  Synthetic
KSAGFPFNK

SEQ ID NO: 1927 - protein, 10 aa, Artificial Sequence
  Synthetic
KSAGFPFNKW

SEQ ID NO: 1928 - protein, 10 aa, Artificial Sequence
  Synthetic
ARLYYDSMSY

SEQ ID NO: 1929 - protein, 9 aa, Artificial Sequence
  Synthetic
FAYTKRNVI

SEQ ID NO: 1930 - protein, 9 aa, Artificial Sequence
  Synthetic
NVIPTITQM

SEQ ID NO: 1931 - protein, 9 aa, Artificial Sequence
  Synthetic
IPTITQMNL

SEQ ID NO: 1932 - protein, 9 aa, Artificial Sequence
  Synthetic
TITQMNLKY

SEQ ID NO: 1933 - protein, 10 aa, Artificial Sequence
  Synthetic
YAISAKNRAR

SEQ ID NO: 1934 - protein, 9 aa, Artificial Sequence
  Synthetic
SAKNRARTV

SEQ ID NO: 1935 - protein, 9 aa, Artificial Sequence
  Synthetic
SICSTMTNR

SEQ ID NO: 1936 - protein, 9 aa, Artificial Sequence
  Synthetic
IAATRGATV

SEQ ID NO: 1937 - protein, 9 aa, Artificial Sequence
  Synthetic
ATVVIGTSK

SEQ ID NO: 1938 - protein, 10 aa, Artificial Sequence
  Synthetic
VENPHLMGWD

SEQ ID NO: 1939 - protein, 9 aa, Artificial Sequence
  Synthetic
NMLRIMASL

SEQ ID NO: 1940 - protein, 9 aa, Artificial Sequence
  Synthetic
LRIMASLVL

SEQ ID NO: 1941 - protein, 9 aa, Artificial Sequence
  Synthetic
IMASLVLAR

SEQ ID NO: 1942 - protein, 9 aa, Artificial Sequence
  Synthetic
MASLVLARK

SEQ ID NO: 1943 - protein, 9 aa, Artificial Sequence
  Synthetic
RLANECAQV

SEQ ID NO: 1944 - protein, 10 aa, Artificial Sequence
  Synthetic
TSSGDATTAY

SEQ ID NO: 1945 - protein, 9 aa, Artificial Sequence
  Synthetic
VRNLQHRLY

SEQ ID NO: 1946 - protein, 9 aa, Artificial Sequence
  Synthetic
FVNEFYAYL

SEQ ID NO: 1947 - protein, 10 aa, Artificial Sequence
  Synthetic
FVNEFYAYLR

SEQ ID NO: 1948 - protein, 9 aa, Artificial Sequence
  Synthetic
LRKHFSMMI

SEQ ID NO: 1949 - protein, 9 aa, Artificial Sequence
  Synthetic
LYYQNNVFM

SEQ ID NO: 1950 - protein, 10 aa, Artificial Sequence
  Synthetic
LVKQGDDYVY

SEQ ID NO: 1951 - protein, 9 aa, Artificial Sequence
  Synthetic
KQGDDYVYL

SEQ ID NO: 1952 - protein, 10 aa, Artificial Sequence
  Synthetic
YLPYPDPSRI

SEQ ID NO: 1953 - protein, 10 aa, Artificial Sequence
  Synthetic
LPYPDPSRIL

SEQ ID NO: 1954 - protein, 10 aa, Artificial Sequence
  Synthetic
QEYADVFHLY

SEQ ID NO: 1955 - protein, 9 aa, Artificial Sequence
  Synthetic
YADVFHLYL

SEQ ID NO: 1956 - protein, 10 aa, Artificial Sequence
  Synthetic
LTNDNTSRYW

SEQ ID NO: 1957 - protein, 9 aa, Artificial Sequence
  Synthetic
WEPEFYEAM

SEQ ID NO: 1958 - protein, 9 aa, Artificial Sequence
  Synthetic
AMYTPHTVL

SEQ ID NO: 1959 - protein, 9 aa, Artificial Sequence
  Synthetic
TPHTVLQAV

SEQ ID NO: 1960 - protein, 10 aa, Artificial Sequence
  Synthetic
QLYLGGMSYY

SEQ ID NO: 1961 - protein, 9 aa, Artificial Sequence
  Synthetic
YRGTTTYKL

SEQ ID NO: 1962 - protein, 9 aa, Artificial Sequence
  Synthetic
TLVPQEHYV

SEQ ID NO: 1963 - protein, 9 aa, Artificial Sequence
  Synthetic
VPQEHYVRI

SEQ ID NO: 1964 - protein, 9 aa, Artificial Sequence
  Synthetic
YQKVGMQKY

SEQ ID NO: 1965 - protein, 9 aa, Artificial Sequence
  Synthetic
FAIGLALYY

SEQ ID NO: 1966 - protein, 9 aa, Artificial Sequence
  Synthetic
YYPSARIVY

SEQ ID NO: 1967 - protein, 9 aa, Artificial Sequence
  Synthetic
IPARARVEC

SEQ ID NO: 1968 - protein, 10 aa, Artificial Sequence
  Synthetic
IPARARVECF

SEQ ID NO: 1969 - protein, 9 aa, Artificial Sequence
  Synthetic
YVFCTVNAL

SEQ ID NO: 1970 - protein, 9 aa, Artificial Sequence
  Synthetic
VVNARLRAK

SEQ ID NO: 1971 - protein, 10 aa, Artificial Sequence
  Synthetic
RPQIGVVREF

SEQ ID NO: 1972 - protein, 9 aa, Artificial Sequence
  Synthetic
AVASKILGL

SEQ ID NO: 1973 - protein, 9 aa, Artificial Sequence
  Synthetic
ILGLPTQTV

SEQ ID NO: 1974 - protein, 10 aa, Artificial Sequence
  Synthetic
EEAIRHVRAW

SEQ ID NO: 1975 - protein, 9 aa, Artificial Sequence
  Synthetic
LQLGFSTGV

SEQ ID NO: 1976 - protein, 9 aa, Artificial Sequence
  Synthetic
MYKGLPWNV

SEQ ID NO: 1977 - protein, 10 aa, Artificial Sequence
  Synthetic
KNLSDRVVFV

SEQ ID NO: 1978 - protein, 9 aa, Artificial Sequence
  Synthetic
PFMIDVQQW

SEQ ID NO: 1979 - protein, 9 aa, Artificial Sequence
  Synthetic
LLADKFPVL

SEQ ID NO: 1980 - protein, 10 aa, Artificial Sequence
  Synthetic
YKIEELFYSY

SEQ ID NO: 1981 - protein, 9 aa, Artificial Sequence
  Synthetic
KIEELFYSY

SEQ ID NO: 1982 - protein, 9 aa, Artificial Sequence
  Synthetic
FTDGVCLFW

SEQ ID NO: 1983 - protein, 9 aa, Artificial Sequence
  Synthetic
SLYVNKHAF

SEQ ID NO: 1984 - protein, 9 aa, Artificial Sequence
  Synthetic
AGFSLWVYK

SEQ ID NO: 1985 - protein, 10 aa, Artificial Sequence
  Synthetic
YNLWNTFTRL

SEQ ID NO: 1986 - protein, 9 aa, Artificial Sequence
  Synthetic
NTFTRLQSL

SEQ ID NO: 1987 - protein, 9 aa, Artificial Sequence
  Synthetic
SLENVAFNV

SEQ ID NO: 1988 - protein, 9 aa, Artificial Sequence
  Synthetic
TTLPVNVAF

SEQ ID NO: 1989 - protein, 9 aa, Artificial Sequence
  Synthetic
TICAPLTVF

SEQ ID NO: 1990 - protein, 9 aa, Artificial Sequence
  Synthetic
GRVDGQVDL

SEQ ID NO: 1991 - protein, 9 aa, Artificial Sequence
  Synthetic
KVDGVVQQL

SEQ ID NO: 1992 - protein, 9 aa, Artificial Sequence
  Synthetic
VVQQLPETY

SEQ ID NO: 1993 - protein, 10 aa, Artificial Sequence
  Synthetic
KPRSQMEIDF

SEQ ID NO: 1994 - protein, 10 aa, Artificial Sequence
  Synthetic
FIERYKLEGY

SEQ ID NO: 1995 - protein, 9 aa, Artificial Sequence
  Synthetic
LLLDDFVEI

SEQ ID NO: 1996 - protein, 9 aa, Artificial Sequence
  Synthetic
SVVSKVVKV

SEQ ID NO: 1997 - protein, 9 aa, Artificial Sequence
  Synthetic
VAMPNLYKM

SEQ ID NO: 1998 - protein, 9 aa, Artificial Sequence
  Synthetic
LPKGIMMNV

SEQ ID NO: 1999 - protein, 10 aa, Artificial Sequence
  Synthetic
CATVHTANKW

SEQ ID NO: 2000 - protein, 9 aa, Artificial Sequence
  Synthetic
KLMGHFAWW

SEQ ID NO: 2001 - protein, 9 aa, Artificial Sequence
  Synthetic
YVMHANYIF

SEQ ID NO: 2002 - protein, 10 aa, Artificial Sequence
  Synthetic
FWRNTNPIQL

SEQ ID NO: 2003 - protein, 9 aa, Artificial Sequence
  Synthetic
WRNTNPIQL

SEQ ID NO: 2004 - protein, 10 aa, Artificial Sequence
  Synthetic
NPIQLSSYSL

SEQ ID NO: 2005 - protein, 10 aa, Artificial Sequence
  Synthetic
SYSLFDMSKF

SEQ ID NO: 2006 - protein, 9 aa, Artificial Sequence
  Synthetic
FPLKLRGTA

SEQ ID NO: 2007 - protein, 10 aa, Artificial Sequence
  Synthetic
FPLKLRGTAV

SEQ ID NO: 2008 - protein, 9 aa, Artificial Sequence
  Synthetic
LRGTAVMSL

SEQ ID NO: 2009 - protein, 9 aa, Artificial Sequence
  Synthetic
TFNGECPNF

SEQ ID NO: 2010 - protein, 9 aa, Artificial Sequence
  Synthetic
GFMGRIRSV

SEQ ID NO: 2011 - protein, 10 aa, Artificial Sequence
  Synthetic
EEIAIILASF

SEQ ID NO: 2012 - protein, 9 aa, Artificial Sequence
  Synthetic
ILSPLYAFA

SEQ ID NO: 2013 - protein, 9 aa, Artificial Sequence
  Synthetic
VRSIFSRTL

SEQ ID NO: 2014 - protein, 10 aa, Artificial Sequence
  Synthetic
ITILDGISQY

SEQ ID NO: 2015 - protein, 9 aa, Artificial Sequence
  Synthetic
RLIDAMMFT

SEQ ID NO: 2016 - protein, 9 aa, Artificial Sequence
  Synthetic
TVYEKLKPV

SEQ ID NO: 2017 - protein, 9 aa, Artificial Sequence
  Synthetic
EIKESVQTF

SEQ ID NO: 2018 - protein, 9 aa, Artificial Sequence
  Synthetic
GETLPTEVL

SEQ ID NO: 2019 - protein, 10 aa, Artificial Sequence
  Synthetic
DTVIEVQGYK

SEQ ID NO: 2020 - protein, 10 aa, Artificial Sequence
  Synthetic
QGYKSVNITF

SEQ ID NO: 2021 - protein, 10 aa, Artificial Sequence
  Synthetic
FELDERIDKV

SEQ ID NO: 2022 - protein, 9 aa, Artificial Sequence
  Synthetic
ELDERIDKV

SEQ ID NO: 2023 - protein, 9 aa, Artificial Sequence
  Synthetic
VLNEKCSAY

SEQ ID NO: 2024 - protein, 10 aa, Artificial Sequence
  Synthetic
VELGTEVNEF

SEQ ID NO: 2025 - protein, 9 aa, Artificial Sequence
  Synthetic
SELLTPLGI

SEQ ID NO: 2026 - protein, 9 aa, Artificial Sequence
  Synthetic
YLFDESGEF

SEQ ID NO: 2027 - protein, 9 aa, Artificial Sequence
  Synthetic
FEPSTQYEY

SEQ ID NO: 2028 - protein, 10 aa, Artificial Sequence
  Synthetic
DDYQGKPLEF

SEQ ID NO: 2029 - protein, 10 aa, Artificial Sequence
  Synthetic
LEFGATSAAL

SEQ ID NO: 2030 - protein, 9 aa, Artificial Sequence
  Synthetic
VEVQPQLEM

SEQ ID NO: 2031 - protein, 9 aa, Artificial Sequence
  Synthetic
LEMELTPVV

SEQ ID NO: 2032 - protein, 10 aa, Artificial Sequence
  Synthetic
MELTPVVQTI

SEQ ID NO: 2033 - protein, 9 aa, Artificial Sequence
  Synthetic
TPVVQTIEV

SEQ ID NO: 2034 - protein, 10 aa, Artificial Sequence
  Synthetic
TIEVNSFSGY

SEQ ID NO: 2035 - protein, 9 aa, Artificial Sequence
  Synthetic
IEVNSFSGY

SEQ ID NO: 2036 - protein, 9 aa, Artificial Sequence
  Synthetic
NSFSGYLKL

SEQ ID NO: 2037 - protein, 9 aa, Artificial Sequence
  Synthetic
YLKLTDNVY

SEQ ID NO: 2038 - protein, 9 aa, Artificial Sequence
  Synthetic
EAKKVKPTV

SEQ ID NO: 2039 - protein, 9 aa, Artificial Sequence
  Synthetic
VVVNAANVY

SEQ ID NO: 2040 - protein, 9 aa, Artificial Sequence
  Synthetic
YIATNGPLK

SEQ ID NO: 2041 - protein, 9 aa, Artificial Sequence
  Synthetic
YENFNQHEV

SEQ ID NO: 2042 - protein, 9 aa, Artificial Sequence
  Synthetic
LLSAGIFGA

SEQ ID NO: 2043 - protein, 9 aa, Artificial Sequence
  Synthetic
GADPIHSLR

SEQ ID NO: 2044 - protein, 9 aa, Artificial Sequence
  Synthetic
RTNVYLAVF

SEQ ID NO: 2045 - protein, 10 aa, Artificial Sequence
  Synthetic
AVFDKNLYDK

SEQ ID NO: 2046 - protein, 9 aa, Artificial Sequence
  Synthetic
LYDKLVSSF

SEQ ID NO: 2047 - protein, 9 aa, Artificial Sequence
  Synthetic
KLVSSFLEM

SEQ ID NO: 2048 - protein, 10 aa, Artificial Sequence
  Synthetic
KIAEIPKEEV

SEQ ID NO: 2049 - protein, 10 aa, Artificial Sequence
  Synthetic
EVKPFITESK

SEQ ID NO: 2050 - protein, 9 aa, Artificial Sequence
  Synthetic
ESKPSVEQR

SEQ ID NO: 2051 - protein, 10 aa, Artificial Sequence
  Synthetic
FLTENLLLYI

SEQ ID NO: 2052 - protein, 9 aa, Artificial Sequence
  Synthetic
LVSDIDITF

SEQ ID NO: 2053 - protein, 9 aa, Artificial Sequence
  Synthetic
APYIVGDVV

SEQ ID NO: 2054 - protein, 9 aa, Artificial Sequence
  Synthetic
LTAVVIPTK

SEQ ID NO: 2055 - protein, 10 aa, Artificial Sequence
  Synthetic
ALRKVPTDNY

SEQ ID NO: 2056 - protein, 10 aa, Artificial Sequence
  Synthetic
KQEILGTVSW

SEQ ID NO: 2057 - protein, 9 aa, Artificial Sequence
  Synthetic
MLAHAEETR

SEQ ID NO: 2058 - protein, 9 aa, Artificial Sequence
  Synthetic
AHAEETRKL

SEQ ID NO: 2059 - protein, 9 aa, Artificial Sequence
  Synthetic
KLMPVCVET

SEQ ID NO: 2060 - protein, 9 aa, Artificial Sequence
  Synthetic
AIVSTIQRK

SEQ ID NO: 2061 - protein, 9 aa, Artificial Sequence
  Synthetic
VVDYGARFY

SEQ ID NO: 2062 - protein, 9 aa, Artificial Sequence
  Synthetic
SLINTLNDL

SEQ ID NO: 2063 - protein, 10 aa, Artificial Sequence
  Synthetic
VSSPDAVTAY

SEQ ID NO: 2064 - protein, 9 aa, Artificial Sequence
  Synthetic
TISLAGSYK

SEQ ID NO: 2065 - protein, 10 aa, Artificial Sequence
  Synthetic
ISLAGSYKDW

SEQ ID NO: 2066 - protein, 9 aa, Artificial Sequence
  Synthetic
YYTSNPTTF

SEQ ID NO: 2067 - protein, 9 aa, Artificial Sequence
  Synthetic
TSNPTTFHL

SEQ ID NO: 2068 - protein, 9 aa, Artificial Sequence
  Synthetic
HLDGEVITF

SEQ ID NO: 2069 - protein, 9 aa, Artificial Sequence
  Synthetic
GEVITFDNL

SEQ ID NO: 2070 - protein, 9 aa, Artificial Sequence
  Synthetic
ITFDNLKTL

SEQ ID NO: 2071 - protein, 9 aa, Artificial Sequence
  Synthetic
RTIKVFTTV

SEQ ID NO: 2072 - protein, 9 aa, Artificial Sequence
  Synthetic
NINLHTQVV

SEQ ID NO: 2073 - protein, 9 aa, Artificial Sequence
  Synthetic
QVVDMSMTY

SEQ ID NO: 2074 - protein, 9 aa, Artificial Sequence
  Synthetic
MSMTYGQQF

SEQ ID NO: 2075 - protein, 9 aa, Artificial Sequence
  Synthetic
LRVEAFEYY

SEQ ID NO: 2076 - protein, 10 aa, Artificial Sequence
  Synthetic
HTTDPSFLGR

SEQ ID NO: 2077 - protein, 9 aa, Artificial Sequence
  Synthetic
FLGRYMSAL

SEQ ID NO: 2078 - protein, 9 aa, Artificial Sequence
  Synthetic
YMSALNHTK

SEQ ID NO: 2079 - protein, 9 aa, Artificial Sequence
  Synthetic
MSALNHTKK

SEQ ID NO: 2080 - protein, 10 aa, Artificial Sequence
  Synthetic
MSALNHTKKW

SEQ ID NO: 2081 - protein, 9 aa, Artificial Sequence
  Synthetic
SALNHTKKW

SEQ ID NO: 2082 - protein, 9 aa, Artificial Sequence
  Synthetic
WKYPQVNGL

SEQ ID NO: 2083 - protein, 10 aa, Artificial Sequence
  Synthetic
YPQVNGLTSI

SEQ ID NO: 2084 - protein, 9 aa, Artificial Sequence
  Synthetic
ARAGEAANF

SEQ ID NO: 2085 - protein, 9 aa, Artificial Sequence
  Synthetic
GEAANFCAL

SEQ ID NO: 2086 - protein, 10 aa, Artificial Sequence
  Synthetic
LGDVRETMSY

SEQ ID NO: 2087 - protein, 9 aa, Artificial Sequence
  Synthetic
VRETMSYLF

SEQ ID NO: 2088 - protein, 9 aa, Artificial Sequence
  Synthetic
VMYMGTLSY

SEQ ID NO: 2089 - protein, 10 aa, Artificial Sequence
  Synthetic
YTGNYQCGHY

SEQ ID NO: 2090 - protein, 9 aa, Artificial Sequence
  Synthetic
DVFYKENSY

SEQ ID NO: 2091 - protein, 10 aa, Artificial Sequence
  Synthetic
YTTTIKPVTY

SEQ ID NO: 2092 - protein, 9 aa, Artificial Sequence
  Synthetic
EIDPKLDNY

SEQ ID NO: 2093 - protein, 9 aa, Artificial Sequence
  Synthetic
NYYKKDNSY

SEQ ID NO: 2094 - protein, 9 aa, Artificial Sequence
  Synthetic
YYKKDNSYF

SEQ ID NO: 2095 - protein, 9 aa, Artificial Sequence
  Synthetic
ASFDNFKFV

SEQ ID NO: 2096 - protein, 9 aa, Artificial Sequence
  Synthetic
KFADDLNQL

SEQ ID NO: 2097 - protein, 9 aa, Artificial Sequence
  Synthetic
ASRELKVTF

SEQ ID NO: 2098 - protein, 10 aa, Artificial Sequence
  Synthetic
DVVAIDYKHY

SEQ ID NO: 2099 - protein, 9 aa, Artificial Sequence
  Synthetic
VVAIDYKHY

SEQ ID NO: 2100 - protein, 9 aa, Artificial Sequence
  Synthetic
DYKHYTPSF

SEQ ID NO: 2101 - protein, 9 aa, Artificial Sequence
  Synthetic
LHKPIVWHV

SEQ ID NO: 2102 - protein, 10 aa, Artificial Sequence
  Synthetic
NKATYKPNTW

SEQ ID NO: 2103 - protein, 10 aa, Artificial Sequence
  Synthetic
SEDAQGMDNL

SEQ ID NO: 2104 - protein, 9 aa, Artificial Sequence
  Synthetic
EEVVENPTI

SEQ ID NO: 2105 - protein, 9 aa, Artificial Sequence
  Synthetic
TEVVGDIIL

SEQ ID NO: 2106 - protein, 10 aa, Artificial Sequence
  Synthetic
AYVDNSSLTI

SEQ ID NO: 2107 - protein, 9 aa, Artificial Sequence
  Synthetic
LTIKKPNEL

SEQ ID NO: 2108 - protein, 9 aa, Artificial Sequence
  Synthetic
KPNELSRVL

SEQ ID NO: 2109 - protein, 9 aa, Artificial Sequence
  Synthetic
NELSRVLGL

SEQ ID NO: 2110 - protein, 9 aa, Artificial Sequence
  Synthetic
SRVLGLKTL

SEQ ID NO: 2111 - protein, 10 aa, Artificial Sequence
  Synthetic
SVPWDTIANY

SEQ ID NO: 2112 - protein, 10 aa, Artificial Sequence
  Synthetic
DTIANYAKPF

SEQ ID NO: 2113 - protein, 9 aa, Artificial Sequence
  Synthetic
YAKPFLNKV

SEQ ID NO: 2114 - protein, 9 aa, Artificial Sequence
  Synthetic
RIKASMPTT

SEQ ID NO: 2115 - protein, 9 aa, Artificial Sequence
  Synthetic
KASMPTTIA

SEQ ID NO: 2116 - protein, 10 aa, Artificial Sequence
  Synthetic
MPTTIAKNTV

SEQ ID NO: 2117 - protein, 9 aa, Artificial Sequence
  Synthetic
TTIAKNTVK

SEQ ID NO: 2118 - protein, 9 aa, Artificial Sequence
  Synthetic
NTVKSVGKF

SEQ ID NO: 2119 - protein, 10 aa, Artificial Sequence
  Synthetic
KFCLEASFNY

SEQ ID NO: 2120 - protein, 9 aa, Artificial Sequence
  Synthetic
CLEASFNYL

SEQ ID NO: 2121 - protein, 9 aa, Artificial Sequence
  Synthetic
KLINIIIWF

SEQ ID NO: 2122 - protein, 9 aa, Artificial Sequence
  Synthetic
SLIYSTAAL

SEQ ID NO: 2123 - protein, 9 aa, Artificial Sequence
  Synthetic
STAALGVLM

SEQ ID NO: 2124 - protein, 9 aa, Artificial Sequence
  Synthetic
MSNLGMPSY

SEQ ID NO: 2125 - protein, 9 aa, Artificial Sequence
  Synthetic
EGYLNSTNV

SEQ ID NO: 2126 - protein, 10 aa, Artificial Sequence
  Synthetic
NSTNVTIATY

SEQ ID NO: 2127 - protein, 9 aa, Artificial Sequence
  Synthetic
STNVTIATY

SEQ ID NO: 2128 - protein, 10 aa, Artificial Sequence
  Synthetic
ETIQITISSF

SEQ ID NO: 2129 - protein, 9 aa, Artificial Sequence
  Synthetic
IQITISSFK

SEQ ID NO: 2130 - protein, 10 aa, Artificial Sequence
  Synthetic
LTAFGLVAEW

SEQ ID NO: 2131 - protein, 9 aa, Artificial Sequence
  Synthetic
LVAEWFLAY

SEQ ID NO: 2132 - protein, 9 aa, Artificial Sequence
  Synthetic
AEWFLAYIL

SEQ ID NO: 2133 - protein, 10 aa, Artificial Sequence
  Synthetic
AEWFLAYILF

SEQ ID NO: 2134 - protein, 9 aa, Artificial Sequence
  Synthetic
AYILFTRFF

SEQ ID NO: 2135 - protein, 9 aa, Artificial Sequence
  Synthetic
AVHFISNSW

SEQ ID NO: 2136 - protein, 10 aa, Artificial Sequence
  Synthetic
HFISNSWLMW

SEQ ID NO: 2137 - protein, 9 aa, Artificial Sequence
  Synthetic
WLMWLIINL

SEQ ID NO: 2138 - protein, 10 aa, Artificial Sequence
  Synthetic
LVQMAPISAM

SEQ ID NO: 2139 - protein, 9 aa, Artificial Sequence
  Synthetic
SAMVRMYIF

SEQ ID NO: 2140 - protein, 10 aa, Artificial Sequence
  Synthetic
RMYIFFASFY

SEQ ID NO: 2141 - protein, 9 aa, Artificial Sequence
  Synthetic
SFYYVWKSY

SEQ ID NO: 2142 - protein, 9 aa, Artificial Sequence
  Synthetic
FYYVWKSYV

SEQ ID NO: 2143 - protein, 10 aa, Artificial Sequence
  Synthetic
YVYANGGKGF

SEQ ID NO: 2144 - protein, 9 aa, Artificial Sequence
  Synthetic
DTFCAGSTF

SEQ ID NO: 2145 - protein, 10 aa, Artificial Sequence
  Synthetic
EVARDLSLQF

SEQ ID NO: 2146 - protein, 9 aa, Artificial Sequence
  Synthetic
VARDLSLQF

SEQ ID NO: 2147 - protein, 10 aa, Artificial Sequence
  Synthetic
TVKNGSIHLY

SEQ ID NO: 2148 - protein, 9 aa, Artificial Sequence
  Synthetic
VKNGSIHLY

SEQ ID NO: 2149 - protein, 10 aa, Artificial Sequence
  Synthetic
YFDKAGQKTY

SEQ ID NO: 2150 - protein, 10 aa, Artificial Sequence
  Synthetic
TYERHSLSHF

SEQ ID NO: 2151 - protein, 9 aa, Artificial Sequence
  Synthetic
YERHSLSHF

SEQ ID NO: 2152 - protein, 9 aa, Artificial Sequence
  Synthetic
ERHSLSHFV

SEQ ID NO: 2153 - protein, 9 aa, Artificial Sequence
  Synthetic
SSAKSASVY

SEQ ID NO: 2154 - protein, 9 aa, Artificial Sequence
  Synthetic
SAKSASVYY

SEQ ID NO: 2155 - protein, 9 aa, Artificial Sequence
  Synthetic
DSAEVAVKM

SEQ ID NO: 2156 - protein, 10 aa, Artificial Sequence
  Synthetic
EVAVKMFDAY

SEQ ID NO: 2157 - protein, 10 aa, Artificial Sequence
  Synthetic
KMFDAYVNTF

SEQ ID NO: 2158 - protein, 9 aa, Artificial Sequence
  Synthetic
MFDAYVNTF

SEQ ID NO: 2159 - protein, 10 aa, Artificial Sequence
  Synthetic
AYVNTFSSTF

SEQ ID NO: 2160 - protein, 9 aa, Artificial Sequence
  Synthetic
YVNTFSSTF

SEQ ID NO: 2161 - protein, 9 aa, Artificial Sequence
  Synthetic
VPMEKLKTL

SEQ ID NO: 2162 - protein, 9 aa, Artificial Sequence
  Synthetic
AEAELAKNV

SEQ ID NO: 2163 - protein, 9 aa, Artificial Sequence
  Synthetic
AELAKNVSL

SEQ ID NO: 2164 - protein, 9 aa, Artificial Sequence
  Synthetic
SLDNVLSTF

SEQ ID NO: 2165 - protein, 10 aa, Artificial Sequence
  Synthetic
TFISAARQGF

SEQ ID NO: 2166 - protein, 10 aa, Artificial Sequence
  Synthetic
DSCNNYMLTY

SEQ ID NO: 2167 - protein, 9 aa, Artificial Sequence
  Synthetic
VENMTPRDL

SEQ ID NO: 2168 - protein, 9 aa, Artificial Sequence
  Synthetic
TPRDLGACI

SEQ ID NO: 2169 - protein, 9 aa, Artificial Sequence
  Synthetic
VAKSHNIAL

SEQ ID NO: 2170 - protein, 10 aa, Artificial Sequence
  Synthetic
AKSHNIALIW

SEQ ID NO: 2171 - protein, 9 aa, Artificial Sequence
  Synthetic
QVVNVVTTK

SEQ ID NO: 2172 - protein, 9 aa, Artificial Sequence
  Synthetic
VVTTKIALK

SEQ ID NO: 2173 - protein, 10 aa, Artificial Sequence
  Synthetic
KQLIKVTLVF

SEQ ID NO: 2174 - protein, 9 aa, Artificial Sequence
  Synthetic
FYLITPVHV

SEQ ID NO: 2175 - protein, 9 aa, Artificial Sequence
  Synthetic
YLITPVHVM

SEQ ID NO: 2176 - protein, 9 aa, Artificial Sequence
  Synthetic
SEIIGYKAI

SEQ ID NO: 2177 - protein, 9 aa, Artificial Sequence
  Synthetic
IAAVITREV

SEQ ID NO: 2178 - protein, 9 aa, Artificial Sequence
  Synthetic
FVVPGLPGT

SEQ ID NO: 2179 - protein, 9 aa, Artificial Sequence
  Synthetic
VPGLPGTIL

SEQ ID NO: 2180 - protein, 10 aa, Artificial Sequence
  Synthetic
RTTNGDFLHF

SEQ ID NO: 2181 - protein, 9 aa, Artificial Sequence
  Synthetic
VLAAECTIF

SEQ ID NO: 2182 - protein, 9 aa, Artificial Sequence
  Synthetic
DASGKPVPY

SEQ ID NO: 2183 - protein, 10 aa, Artificial Sequence
  Synthetic
TNVLEGSVAY

SEQ ID NO: 2184 - protein, 9 aa, Artificial Sequence
  Synthetic
GSVAYESLR

SEQ ID NO: 2185 - protein, 9 aa, Artificial Sequence
  Synthetic
RPDTRYVLM

SEQ ID NO: 2186 - protein, 9 aa, Artificial Sequence
  Synthetic
SIIQFPNTY

SEQ ID NO: 2187 - protein, 9 aa, Artificial Sequence
  Synthetic
WVLNNDYYR

SEQ ID NO: 2188 - protein, 9 aa, Artificial Sequence
  Synthetic
SLPGVFCGV

SEQ ID NO: 2189 - protein, 9 aa, Artificial Sequence
  Synthetic
DAVNLLTNM

SEQ ID NO: 2190 - protein, 9 aa, Artificial Sequence
  Synthetic
IVAGGIVAI

SEQ ID NO: 2191 - protein, 9 aa, Artificial Sequence
  Synthetic
LAYYFMRFR

SEQ ID NO: 2192 - protein, 9 aa, Artificial Sequence
  Synthetic
YFMRFRRAF

SEQ ID NO: 2193 - protein, 10 aa, Artificial Sequence
  Synthetic
FGEYSHVVAF

SEQ ID NO: 2194 - protein, 9 aa, Artificial Sequence
  Synthetic
SFLPGVYSV

SEQ ID NO: 2195 - protein, 9 aa, Artificial Sequence
  Synthetic
IYLYLTFYL

SEQ ID NO: 2196 - protein, 10 aa, Artificial Sequence
  Synthetic
YLTNDVSFLA

SEQ ID NO: 2197 - protein, 9 aa, Artificial Sequence
  Synthetic
FLAHIQWMV

SEQ ID NO: 2198 - protein, 9 aa, Artificial Sequence
  Synthetic
MFTPLVPFW

SEQ ID NO: 2199 - protein, 9 aa, Artificial Sequence
  Synthetic
VPFWITIAY

SEQ ID NO: 2200 - protein, 9 aa, Artificial Sequence
  Synthetic
WFFSNYLKR

SEQ ID NO: 2201 - protein, 9 aa, Artificial Sequence
  Synthetic
DVLLPLTQY

SEQ ID NO: 2202 - protein, 9 aa, Artificial Sequence
  Synthetic
LPLTQYNRY

SEQ ID NO: 2203 - protein, 9 aa, Artificial Sequence
  Synthetic
GAMDTTSYR

SEQ ID NO: 2204 - protein, 9 aa, Artificial Sequence
  Synthetic
SNSGSDVLY

SEQ ID NO: 2205 - protein, 9 aa, Artificial Sequence
  Synthetic
LYQPPQTSI

SEQ ID NO: 2206 - protein, 9 aa, Artificial Sequence
  Synthetic
AVLQSGFRK

SEQ ID NO: 2207 - protein, 9 aa, Artificial Sequence
  Synthetic
TANPKTPKY

SEQ ID NO: 2208 - protein, 9 aa, Artificial Sequence
  Synthetic
NPKTPKYKF

SEQ ID NO: 2209 - protein, 9 aa, Artificial Sequence
  Synthetic
IQPGQTFSV

SEQ ID NO: 2210 - protein, 9 aa, Artificial Sequence
  Synthetic
QPGQTFSVL

SEQ ID NO: 2211 - protein, 10 aa, Artificial Sequence
  Synthetic
SPSGVYQCAM

SEQ ID NO: 2212 - protein, 9 aa, Artificial Sequence
  Synthetic
ILTSLLVLV

SEQ ID NO: 2213 - protein, 9 aa, Artificial Sequence
  Synthetic
FLYENAFLP

SEQ ID NO: 2214 - protein, 10 aa, Artificial Sequence
  Synthetic
LPFAMGIIAM

SEQ ID NO: 2215 - protein, 9 aa, Artificial Sequence
  Synthetic
MFVKHKHAF

SEQ ID NO: 2216 - protein, 9 aa, Artificial Sequence
  Synthetic
FVKHKHAFL

SEQ ID NO: 2217 - protein, 10 aa, Artificial Sequence
  Synthetic
LFLLPSLATV

SEQ ID NO: 2218 - protein, 10 aa, Artificial Sequence
  Synthetic
FLLPSLATVA

SEQ ID NO: 2219 - protein, 9 aa, Artificial Sequence
  Synthetic
VYMPASWVM

SEQ ID NO: 2220 - protein, 9 aa, Artificial Sequence
  Synthetic
RIMTWLDMV

SEQ ID NO: 2221 - protein, 9 aa, Artificial Sequence
  Synthetic
WLDMVDTSL

SEQ ID NO: 2222 - protein, 10 aa, Artificial Sequence
  Synthetic
VMYASAVVLL

SEQ ID NO: 2223 - protein, 9 aa, Artificial Sequence
  Synthetic
MYASAVVLL

SEQ ID NO: 2224 - protein, 9 aa, Artificial Sequence
  Synthetic
YASAVVLLI

SEQ ID NO: 2225 - protein, 9 aa, Artificial Sequence
  Synthetic
TLMNVLTLV

SEQ ID NO: 2226 - protein, 9 aa, Artificial Sequence
  Synthetic
FLARGIVFM

SEQ ID NO: 2227 - protein, 9 aa, Artificial Sequence
  Synthetic
IFFITGNTL

SEQ ID NO: 2228 - protein, 9 aa, Artificial Sequence
  Synthetic
GVYDYLVST

SEQ ID NO: 2229 - protein, 10 aa, Artificial Sequence
  Synthetic
YDYLVSTQEF

SEQ ID NO: 2230 - protein, 9 aa, Artificial Sequence
  Synthetic
FRYMNSQGL

SEQ ID NO: 2231 - protein, 9 aa, Artificial Sequence
  Synthetic
GLLPPKNSI

SEQ ID NO: 2232 - protein, 9 aa, Artificial Sequence
  Synthetic
KLNIKLLGV

SEQ ID NO: 2233 - protein, 9 aa, Artificial Sequence
  Synthetic
EAFEKMVSL

SEQ ID NO: 2234 - protein, 9 aa, Artificial Sequence
  Synthetic
SLLSVLLSM

SEQ ID NO: 2235 - protein, 9 aa, Artificial Sequence
  Synthetic
TFTYASALW

SEQ ID NO: 2236 - protein, 9 aa, Artificial Sequence
  Synthetic
AWPLIVTAL

SEQ ID NO: 2237 - protein, 9 aa, Artificial Sequence
  Synthetic
GPKVKYLYF

SEQ ID NO: 2238 - protein, 9 aa, Artificial Sequence
  Synthetic
YFIKGLNNL

SEQ ID NO: 2239 - protein, 9 aa, Artificial Sequence
  Synthetic
YINVFAFPF

SEQ ID NO: 2240 - protein, 9 aa, Artificial Sequence
  Synthetic
NVFAFPFTI

SEQ ID NO: 2241 - protein, 9 aa, Artificial Sequence
  Synthetic
FTIGTVTLK

SEQ ID NO: 2242 - protein, 9 aa, Artificial Sequence
  Synthetic
ATIPIQASL

SEQ ID NO: 2243 - protein, 9 aa, Artificial Sequence
  Synthetic
ALLAVFQSA

SEQ ID NO: 2244 - protein, 9 aa, Artificial Sequence
  Synthetic
QSASKIITL

SEQ ID NO: 2245 - protein, 9 aa, Artificial Sequence
  Synthetic
SASKIITLK

SEQ ID NO: 2246 - protein, 9 aa, Artificial Sequence
  Synthetic
ITLKKRWQL

SEQ ID NO: 2247 - protein, 9 aa, Artificial Sequence
  Synthetic
TLKKRWQLA

SEQ ID NO: 2248 - protein, 9 aa, Artificial Sequence
  Synthetic
NLLLLFVTV

SEQ ID NO: 2249 - protein, 9 aa, Artificial Sequence
  Synthetic
FVTVYSHLL

SEQ ID NO: 2250 - protein, 9 aa, Artificial Sequence
  Synthetic
TVYSHLLLV

SEQ ID NO: 2251 - protein, 9 aa, Artificial Sequence
  Synthetic
VAAGLEAPF

SEQ ID NO: 2252 - protein, 10 aa, Artificial Sequence
  Synthetic
AAGLEAPFLY

SEQ ID NO: 2253 - protein, 9 aa, Artificial Sequence
  Synthetic
AGLEAPFLY

SEQ ID NO: 2254 - protein, 9 aa, Artificial Sequence
  Synthetic
GLEAPFLYL

SEQ ID NO: 2255 - protein, 9 aa, Artificial Sequence
  Synthetic
LEAPFLYLY

SEQ ID NO: 2256 - protein, 9 aa, Artificial Sequence
  Synthetic
APFLYLYAL

SEQ ID NO: 2257 - protein, 9 aa, Artificial Sequence
  Synthetic
FLYLYALVY

SEQ ID NO: 2258 - protein, 9 aa, Artificial Sequence
  Synthetic
LYLYALVYF

SEQ ID NO: 2259 - protein, 9 aa, Artificial Sequence
  Synthetic
FVRIIMRLW

SEQ ID NO: 2260 - protein, 9 aa, Artificial Sequence
  Synthetic
VRIIMRLWL

SEQ ID NO: 2261 - protein, 9 aa, Artificial Sequence
  Synthetic
CRSKNPLLY

SEQ ID NO: 2262 - protein, 9 aa, Artificial Sequence
  Synthetic
NPLLYDANY

SEQ ID NO: 2263 - protein, 10 aa, Artificial Sequence
  Synthetic
IPYNSVTSSI

SEQ ID NO: 2264 - protein, 10 aa, Artificial Sequence
  Synthetic
TTSPISEHDY

SEQ ID NO: 2265 - protein, 9 aa, Artificial Sequence
  Synthetic
HSYFTSDYY

SEQ ID NO: 2266 - protein, 9 aa, Artificial Sequence
  Synthetic
YFTSDYYQL

SEQ ID NO: 2267 - protein, 10 aa, Artificial Sequence
  Synthetic
YFTSDYYQLY

SEQ ID NO: 2268 - protein, 10 aa, Artificial Sequence
  Synthetic
DYYQLYSTQL

SEQ ID NO: 2269 - protein, 9 aa, Artificial Sequence
  Synthetic
HVTFFIYNK

SEQ ID NO: 2270 - protein, 9 aa, Artificial Sequence
  Synthetic
EEHVQIHTI

SEQ ID NO: 2271 - protein, 9 aa, Artificial Sequence
  Synthetic
IYDEPTTTT

SEQ ID NO: 2272 - protein, 10 aa, Artificial Sequence
  Synthetic
HLVDFQVTIA

SEQ ID NO: 2273 - protein, 9 aa, Artificial Sequence
  Synthetic
VTIAEILLI

SEQ ID NO: 2274 - protein, 9 aa, Artificial Sequence
  Synthetic
LIIMRTFKV

SEQ ID NO: 2275 - protein, 9 aa, Artificial Sequence
  Synthetic
TFKVSIWNL

SEQ ID NO: 2276 - protein, 9 aa, Artificial Sequence
  Synthetic
LDYIINLII

SEQ ID NO: 2277 - protein, 10 aa, Artificial Sequence
  Synthetic
QECVRGTTVL

SEQ ID NO: 2278 - protein, 10 aa, Artificial Sequence
  Synthetic
YEGNSPFHPL

SEQ ID NO: 2279 - protein, 9 aa, Artificial Sequence
  Synthetic
EGNSPFHPL

SEQ ID NO: 2280 - protein, 10 aa, Artificial Sequence
  Synthetic
HPLADNKFAL

SEQ ID NO: 2281 - protein, 9 aa, Artificial Sequence
  Synthetic
SPIFLIVAA

SEQ ID NO: 2282 - protein, 9 aa, Artificial Sequence
  Synthetic
QSCTQHQPY

SEQ ID NO: 2283 - protein, 10 aa, Artificial Sequence
  Synthetic
VDDPCPIHFY

SEQ ID NO: 2284 - protein, 10 aa, Artificial Sequence
  Synthetic
RVGARKSAPL

SEQ ID NO: 2285 - protein, 9 aa, Artificial Sequence
  Synthetic
EPKLGSLVV

SEQ ID NO: 2286 - protein, 9 aa, Artificial Sequence
  Synthetic
EYHDVRVVL

SEQ ID NO: 2287 - protein, 15 aa, Artificial Sequence
  Synthetic
FYVYSRVKNLNSSRV

SEQ ID NO: 2288 - protein, 15 aa, Artificial Sequence
  Synthetic
QFAYANRNRFLYIIK

SEQ ID NO: 2289 - protein, 15 aa, Artificial Sequence
  Synthetic
VLAAVYRINWITGGI

SEQ ID NO: 2290 - protein, 15 aa, Artificial Sequence
  Synthetic
YRINWITGGIAIAMA

SEQ ID NO: 2291 - protein, 15 aa, Artificial Sequence
  Synthetic
CLVGLMWLSYFIASF

SEQ ID NO: 2292 - protein, 15 aa, Artificial Sequence
  Synthetic
MWLSYFIASFRLFAR

SEQ ID NO: 2293 - protein, 15 aa, Artificial Sequence
  Synthetic
TNILLNVPLHGTILT

SEQ ID NO: 2294 - protein, 15 aa, Artificial Sequence
  Synthetic
SELVIGAVILRGHLR

SEQ ID NO: 2295 - protein, 18 aa, Artificial Sequence
  Synthetic
GAVILRGHLRIAGHHLGR

SEQ ID NO: 2296 - protein, 15 aa, Artificial Sequence
  Synthetic
LRGHLRIAGHHLGRC

SEQ ID NO: 2297 - protein, 15 aa, Artificial Sequence
  Synthetic
RGHLRIAGHHLGRCD

SEQ ID NO: 2298 - protein, 15 aa, Artificial Sequence
  Synthetic
IAGHHLGRCDIKDLP

SEQ ID NO: 2299 - protein, 15 aa, Artificial Sequence
  Synthetic
LGRCDIKDLPKEITV

SEQ ID NO: 2300 - protein, 15 aa, Artificial Sequence
  Synthetic
IKDLPKEITVATSRT

SEQ ID NO: 2301 - protein, 15 aa, Artificial Sequence
  Synthetic
KEITVATSRTLSYYK

SEQ ID NO: 2302 - protein, 17 aa, Artificial Sequence
  Synthetic
TSRTLSYYKLGASQRVA

SEQ ID NO: 2303 - protein, 15 aa, Artificial Sequence
  Synthetic
SRTLSYYKLGASQRV

SEQ ID NO: 2304 - protein, 15 aa, Artificial Sequence
  Synthetic
LSYYKLGASQRVAGD

SEQ ID NO: 2305 - protein, 15 aa, Artificial Sequence
  Synthetic
SYYKLGASQRVAGDS

SEQ ID NO: 2306 - protein, 15 aa, Artificial Sequence
  Synthetic
LGASQRVAGDSGFAA

SEQ ID NO: 2307 - protein, 15 aa, Artificial Sequence
  Synthetic
SGFAAYSRYRIGNYK

SEQ ID NO: 2308 - protein, 15 aa, Artificial Sequence
  Synthetic
ASWFTALTQHGKEDL

SEQ ID NO: 2309 - protein, 15 aa, Artificial Sequence
  Synthetic
SWFTALTQHGKEDLK

SEQ ID NO: 2310 - protein, 15 aa, Artificial Sequence
  Synthetic
DDQIGYYRRATRRIR

SEQ ID NO: 2311 - protein, 15 aa, Artificial Sequence
  Synthetic
IGYYRRATRRIRGGD

SEQ ID NO: 2312 - protein, 15 aa, Artificial Sequence
  Synthetic
YYRRATRRIRGGDGK

SEQ ID NO: 2313 - protein, 15 aa, Artificial Sequence
  Synthetic
MKDLSPRWYFYYLGT

SEQ ID NO: 2314 - protein, 15 aa, Artificial Sequence
  Synthetic
RWYFYYLGTGPEAGL

SEQ ID NO: 2315 - protein, 15 aa, Artificial Sequence
  Synthetic
NKDGIIWVATEGALN

SEQ ID NO: 2316 - protein, 15 aa, Artificial Sequence
  Synthetic
KDGIIWVATEGALNT

SEQ ID NO: 2317 - protein, 15 aa, Artificial Sequence
  Synthetic
AIVLQLPQGTTLPKG

SEQ ID NO: 2318 - protein, 15 aa, Artificial Sequence
  Synthetic
AGNGGDAALALLLLD

SEQ ID NO: 2319 - protein, 15 aa, Artificial Sequence
  Synthetic
DAALALLLLDRLNQL

SEQ ID NO: 2320 - protein, 15 aa, Artificial Sequence
  Synthetic
LLLLDRLNQLESKMS

SEQ ID NO: 2321 - protein, 15 aa, Artificial Sequence
  Synthetic
AAEASKKPRQKRTAT

SEQ ID NO: 2322 - protein, 15 aa, Artificial Sequence
  Synthetic
KKPRQKRTATKAYNV

SEQ ID NO: 2323 - protein, 15 aa, Artificial Sequence
  Synthetic
KRTATKAYNVTQAFG

SEQ ID NO: 2324 - protein, 15 aa, Artificial Sequence
  Synthetic
KAYNVTQAFGRRGPE

SEQ ID NO: 2325 - protein, 15 aa, Artificial Sequence
  Synthetic
LIRQGTDYKHWPQIA

SEQ ID NO: 2326 - protein, 15 aa, Artificial Sequence
  Synthetic
YKHWPQIAQFAPSAS

SEQ ID NO: 2327 - protein, 15 aa, Artificial Sequence
  Synthetic
WPQIAQFAPSASAFF

SEQ ID NO: 2328 - protein, 15 aa, Artificial Sequence
  Synthetic
ASAFFGMSRIGMEVT

SEQ ID NO: 2329 - protein, 20 aa, Artificial Sequence
  Synthetic
GMEVTPSGTWLTYTGAIKLD

SEQ ID NO: 2330 - protein, 15 aa, Artificial Sequence
  Synthetic
PSGTWLTYTGAIKLD

SEQ ID NO: 2331 - protein, 15 aa, Artificial Sequence
  Synthetic
GTWLTYTGAIKLDDK

SEQ ID NO: 2332 - protein, 15 aa, Artificial Sequence
  Synthetic
FKDQVILLNKHIDAY

SEQ ID NO: 2333 - protein, 15 aa, Artificial Sequence
  Synthetic
ILLNKHIDAYKTFPP

SEQ ID NO: 2334 - protein, 15 aa, Artificial Sequence
  Synthetic
LMIERFVSLAIDAYP

SEQ ID NO: 2335 - protein, 15 aa, Artificial Sequence
  Synthetic
LDDFVEIIKSQDLSV

SEQ ID NO: 2336 - protein, 15 aa, Artificial Sequence
  Synthetic
KVTFFPDLNGDVVAI

SEQ ID NO: 2337 - protein, 15 aa, Artificial Sequence
  Synthetic
KHFYWFFSNYLKRRV

SEQ ID NO: 2338 - protein, 15 aa, Artificial Sequence
  Synthetic
NRYFRLTLGVYDYLV

SEQ ID NO: 2339 - protein, 15 aa, Artificial Sequence
  Synthetic
INVFAFPFTIYSLLL

SEQ ID NO: 2340 - protein, 15 aa, Artificial Sequence
  Synthetic
FMRIFTIGTVTLKQG

SEQ ID NO: 2341 - protein, 15 aa, Artificial Sequence
  Synthetic
KKRWQLALSKGVHFV

SEQ ID NO: 2342 - protein, 15 aa, Artificial Sequence
  Synthetic
LYLYALVYFLQSINF

SEQ ID NO: 2343 - protein, 15 aa, Artificial Sequence
  Synthetic
QSINFVRIIMRLWLC

SEQ ID NO: 2344 - protein, 15 aa, Artificial Sequence
  Synthetic
IWNLDYIINLIIKNL

SEQ ID NO: 2345 - protein, 15 aa, Artificial Sequence
  Synthetic
QEEVQELYSPIFLIV

SEQ ID NO: 2346 - protein, 15 aa, Artificial Sequence
  Synthetic
TQHQPYVVDDPCPIH

SEQ ID NO: 2347 - protein, 15 aa, Artificial Sequence
  Synthetic
YVVDDPCPIHFYSKW

SEQ ID NO: 2348 - protein, 15 aa, Artificial Sequence
  Synthetic
PCPIHFYSKWYIRVG

SEQ ID NO: 2349 - protein, 15 aa, Artificial Sequence
  Synthetic
FYSKWYIRVGARKSA

SEQ ID NO: 2350 - protein, 15 aa, Artificial Sequence
  Synthetic
SKWYIRVGARKSAPL

SEQ ID NO: 2351 - protein, 15 aa, Artificial Sequence
  Synthetic
YIRVGARKSAPLIEL

SEQ ID NO: 2352 - protein, 15 aa, Artificial Sequence
  Synthetic
IGNYTVSCLPFTINC

SEQ ID NO: 2353 - protein, 15 aa, Artificial Sequence
  Synthetic
FTINCQEPKLGSLVV

SEQ ID NO: 2354 - protein, 15 aa, Artificial Sequence
  Synthetic
GSLVVRCSFYEDFLE

SEQ ID NO: 2355 - protein, 15 aa, Artificial Sequence
  Synthetic
RCSFYEDFLEYHDVR

SEQ ID NO: 2356 - protein, 15 aa, Artificial Sequence
  Synthetic
SEETGTLIVNSVLLF

SEQ ID NO: 2357 - protein, 15 aa, Artificial Sequence
  Synthetic
FLLVTLAILTALRLC

SEQ ID NO: 2358 - protein, 15 aa, Artificial Sequence
  Synthetic
LAILTALRLCAYCCN

SEQ ID NO: 2359 - protein, 15 aa, Artificial Sequence
  Synthetic
EELKKLLEQWNLVIG

SEQ ID NO: 2360 - protein, 15 aa, Artificial Sequence
  Synthetic
LLEQWNLVIGFLFLT

SEQ ID NO: 2361 - protein, 15 aa, Artificial Sequence
  Synthetic
NLVIGFLFLTWICLL

SEQ ID NO: 2362 - protein, 15 aa, Artificial Sequence
  Synthetic
FLFLTWICLLQFAYA

SEQ ID NO: 2363 - protein, 15 aa, Artificial Sequence
  Synthetic
WICLLQFAYANRNRF

SEQ ID NO: 2364 - protein, 15 aa, Artificial Sequence
  Synthetic
NRNRFLYIIKLIFLW

SEQ ID NO: 2365 - protein, 15 aa, Artificial Sequence
  Synthetic
LYIIKLIFLWLLWPV

SEQ ID NO: 2366 - protein, 15 aa, Artificial Sequence
  Synthetic
LIFLWLLWPVTLACF

SEQ ID NO: 2367 - protein, 15 aa, Artificial Sequence
  Synthetic
LLWPVTLACFVLAAV

SEQ ID NO: 2368 - protein, 15 aa, Artificial Sequence
  Synthetic
ITGGIAIAMACLVGL

SEQ ID NO: 2369 - protein, 15 aa, Artificial Sequence
  Synthetic
AIAMACLVGLMWLSY

SEQ ID NO: 2370 - protein, 15 aa, Artificial Sequence
  Synthetic
FIASFRLFARTRSMW

SEQ ID NO: 2371 - protein, 15 aa, Artificial Sequence
  Synthetic
RLFARTRSMWSFNPE

SEQ ID NO: 2372 - protein, 15 aa, Artificial Sequence
  Synthetic
TRSMWSFNPETNILL

SEQ ID NO: 2373 - protein, 15 aa, Artificial Sequence
  Synthetic
SFNPETNILLNVPLH

SEQ ID NO: 2374 - protein, 15 aa, Artificial Sequence
  Synthetic
NVPLHGTILTRPLLE

SEQ ID NO: 2375 - protein, 15 aa, Artificial Sequence
  Synthetic
GTILTRPLLESELVI

SEQ ID NO: 2376 - protein, 15 aa, Artificial Sequence
  Synthetic
RPLLESELVIGAVIL

SEQ ID NO: 2377 - protein, 15 aa, Artificial Sequence
  Synthetic
GAVILRGHLRIAGHH

SEQ ID NO: 2378 - protein, 15 aa, Artificial Sequence
  Synthetic
LRIAGHHLGRCDIKD

SEQ ID NO: 2379 - protein, 15 aa, Artificial Sequence
  Synthetic
ATSRTLSYYKLGASQ

SEQ ID NO: 2380 - protein, 15 aa, Artificial Sequence
  Synthetic
RVAGDSGFAAYSRYR

SEQ ID NO: 2381 - protein, 15 aa, Artificial Sequence
  Synthetic
YSRYRIGNYKLNTDH

SEQ ID NO: 2382 - protein, 15 aa, Artificial Sequence
  Synthetic
IGNYKLNTDHSSSSD

SEQ ID NO: 2383 - protein, 15 aa, Artificial Sequence
  Synthetic
LNTDHSSSSDNIALL

SEQ ID NO: 2384 - protein, 15 aa, Artificial Sequence
  Synthetic
PQNQRNAPRITFGGP

SEQ ID NO: 2385 - protein, 15 aa, Artificial Sequence
  Synthetic
NAPRITFGGPSDSTG

SEQ ID NO: 2386 - protein, 15 aa, Artificial Sequence
  Synthetic
TFGGPSDSTGSNQNG

SEQ ID NO: 2387 - protein, 15 aa, Artificial Sequence
  Synthetic
LTQHGKEDLKFPRGQ

SEQ ID NO: 2388 - protein, 15 aa, Artificial Sequence
  Synthetic
FPRGQGVPINTNSSP

SEQ ID NO: 2389 - protein, 15 aa, Artificial Sequence
  Synthetic
GVPINTNSSPDDQIG

SEQ ID NO: 2390 - protein, 15 aa, Artificial Sequence
  Synthetic
TRRIRGGDGKMKDLS

SEQ ID NO: 2391 - protein, 15 aa, Artificial Sequence
  Synthetic
GGDGKMKDLSPRWYF

SEQ ID NO: 2392 - protein, 20 aa, Artificial Sequence
  Synthetic
MKDLSPRWYFYYLGTGPEAG

SEQ ID NO: 2393 - protein, 15 aa, Artificial Sequence
  Synthetic
PRWYFYYLGTGPEAG

SEQ ID NO: 2394 - protein, 15 aa, Artificial Sequence
  Synthetic
LPYGANKDGIIWVAT

SEQ ID NO: 2395 - protein, 15 aa, Artificial Sequence
  Synthetic
IWVATEGALNTPKDH

SEQ ID NO: 2396 - protein, 15 aa, Artificial Sequence
  Synthetic
EGALNTPKDHIGTRN

SEQ ID NO: 2397 - protein, 15 aa, Artificial Sequence
  Synthetic
GKGQQQQGQTVTKKS

SEQ ID NO: 2398 - protein, 15 aa, Artificial Sequence
  Synthetic
KPRQKRTATKAYNVT

SEQ ID NO: 2399 - protein, 15 aa, Artificial Sequence
  Synthetic
TQAFGRRGPEQTQGN

SEQ ID NO: 2400 - protein, 15 aa, Artificial Sequence
  Synthetic
RRGPEQTQGNFGDQE

SEQ ID NO: 2401 - protein, 15 aa, Artificial Sequence
  Synthetic
FGDQELIRQGTDYKH

SEQ ID NO: 2402 - protein, 15 aa, Artificial Sequence
  Synthetic
TDYKHWPQIAQFAPS

SEQ ID NO: 2403 - protein, 15 aa, Artificial Sequence
  Synthetic
QFAPSASAFFGMSRI

SEQ ID NO: 2404 - protein, 15 aa, Artificial Sequence
  Synthetic
AFFGMSRIGMEVTPS

SEQ ID NO: 2405 - protein, 15 aa, Artificial Sequence
  Synthetic
GMEVTPSGTWLTYTG

SEQ ID NO: 2406 - protein, 18 aa, Artificial Sequence
  Synthetic
TWLTYTGAIKLDDKDPNF

SEQ ID NO: 2407 - protein, 15 aa, Artificial Sequence
  Synthetic
LTYTGAIKLDDKDPN

SEQ ID NO: 2408 - protein, 15 aa, Artificial Sequence
  Synthetic
AIKLDDKDPNFKDQV

SEQ ID NO: 2409 - protein, 18 aa, Artificial Sequence
  Synthetic
PNFKDQVILLNKHIDAYK

SEQ ID NO: 2410 - protein, 15 aa, Artificial Sequence
  Synthetic
HIDAYKTFPPTEPKK

SEQ ID NO: 2411 - protein, 15 aa, Artificial Sequence
  Synthetic
QKKQQTVTLLPAADL

SEQ ID NO: 2412 - protein, 16 aa, Artificial Sequence
  Synthetic
KQQTVTLLPAADLDDF

SEQ ID NO: 2413 - protein, 15 aa, Artificial Sequence
  Synthetic
TVTLLPAADLDDFSK

SEQ ID NO: 2414 - protein, 15 aa, Artificial Sequence
  Synthetic
AADLDDFSKQLQQSM

SEQ ID NO: 2415 - protein, 15 aa, Artificial Sequence
  Synthetic
VLSFCAFAVDAAKAY

SEQ ID NO: 2416 - protein, 15 aa, Artificial Sequence
  Synthetic
PDILRVYANLGERVR

SEQ ID NO: 2417 - protein, 15 aa, Artificial Sequence
  Synthetic
SLLMPILTLTRALTA

SEQ ID NO: 2418 - protein, 15 aa, Artificial Sequence
  Synthetic
HCANFNVLFSTVFPP

SEQ ID NO: 2419 - protein, 15 aa, Artificial Sequence
  Synthetic
NVLFSTVFPPTSFGP

SEQ ID NO: 2420 - protein, 15 aa, Artificial Sequence
  Synthetic
QDALFAYTKRNVIPT

SEQ ID NO: 2421 - protein, 15 aa, Artificial Sequence
  Synthetic
KLLKSIAATRGATVV

SEQ ID NO: 2422 - protein, 15 aa, Artificial Sequence
  Synthetic
IAATRGATVVIGTSK

SEQ ID NO: 2423 - protein, 15 aa, Artificial Sequence
  Synthetic
YPKCDRAMPNMLRIM

SEQ ID NO: 2424 - protein, 15 aa, Artificial Sequence
  Synthetic
RAMPNMLRIMASLVL

SEQ ID NO: 2425 - protein, 15 aa, Artificial Sequence
  Synthetic
SHRFYRLANECAQVL

SEQ ID NO: 2426 - protein, 15 aa, Artificial Sequence
  Synthetic
SEMVMCGGSLYVKPG

SEQ ID NO: 2427 - protein, 15 aa, Artificial Sequence
  Synthetic
FNICQAVTANVNALL

SEQ ID NO: 2428 - protein, 15 aa, Artificial Sequence
  Synthetic
AVTANVNALLSTDGN

SEQ ID NO: 2429 - protein, 15 aa, Artificial Sequence
  Synthetic
EFYAYLRKHFSMMIL

SEQ ID NO: 2430 - protein, 15 aa, Artificial Sequence
  Synthetic
LRKHFSMMILSDDAV

SEQ ID NO: 2431 - protein, 15 aa, Artificial Sequence
  Synthetic
GLVASIKNFKSVLYY

SEQ ID NO: 2432 - protein, 15 aa, Artificial Sequence
  Synthetic
KTDGTLMIERFVSLA

SEQ ID NO: 2433 - protein, 15 aa, Artificial Sequence
  Synthetic
FVSLAIDAYPLTKHP

SEQ ID NO: 2434 - protein, 15 aa, Artificial Sequence
  Synthetic
IDAYPLTKHPNQEYA

SEQ ID NO: 2435 - protein, 15 aa, Artificial Sequence
  Synthetic
DVFHLYLQYIRKLHD

SEQ ID NO: 2436 - protein, 15 aa, Artificial Sequence
  Synthetic
TSHKLVLSVNPYVCN

SEQ ID NO: 2437 - protein, 15 aa, Artificial Sequence
  Synthetic
ELHLSWEVGKPRPPL

SEQ ID NO: 2438 - protein, 15 aa, Artificial Sequence
  Synthetic
PRPPLNRNYVFTGYR

SEQ ID NO: 2439 - protein, 15 aa, Artificial Sequence
  Synthetic
FTGYRVTKNSKVQIG

SEQ ID NO: 2440 - protein, 15 aa, Artificial Sequence
  Synthetic
VTKNSKVQIGEYTFE

SEQ ID NO: 2441 - protein, 15 aa, Artificial Sequence
  Synthetic
VNARLRAKHYVYIGD

SEQ ID NO: 2442 - protein, 15 aa, Artificial Sequence
  Synthetic
ISPYNSQNAVASKIL

SEQ ID NO: 2443 - protein, 15 aa, Artificial Sequence
  Synthetic
NVNRFNVAITRAKVG

SEQ ID NO: 2444 - protein, 15 aa, Artificial Sequence
  Synthetic
NMFITREEAIRHVRA

SEQ ID NO: 2445 - protein, 15 aa, Artificial Sequence
  Synthetic
REEAIRHVRAWIGFD

SEQ ID NO: 2446 - protein, 15 aa, Artificial Sequence
  Synthetic
PLMYKGLPWNVVRIK

SEQ ID NO: 2447 - protein, 15 aa, Artificial Sequence
  Synthetic
EIIKSQDLSVVSKVV

SEQ ID NO: 2448 - protein, 15 aa, Artificial Sequence
  Synthetic
TQLCQYLNTLTLAVP

SEQ ID NO: 2449 - protein, 15 aa, Artificial Sequence
  Synthetic
AVMSLKEGQINDMIL

SEQ ID NO: 2450 - protein, 15 aa, Artificial Sequence
  Synthetic
KEGQINDMILSLLSK

SEQ ID NO: 2451 - protein, 15 aa, Artificial Sequence
  Synthetic
RENNRVVISSDVLVN

SEQ ID NO: 2452 - protein, 15 aa, Artificial Sequence
  Synthetic
PLNSIIKTIQPRVEK

SEQ ID NO: 2453 - protein, 15 aa, Artificial Sequence
  Synthetic
EEIAIILASFSASTS

SEQ ID NO: 2454 - protein, 15 aa, Artificial Sequence
  Synthetic
SPLYAFASEAARVVR

SEQ ID NO: 2455 - protein, 15 aa, Artificial Sequence
  Synthetic
AITILDGISQYSLRL

SEQ ID NO: 2456 - protein, 15 aa, Artificial Sequence
  Synthetic
QTFFKLVNKFLALCA

SEQ ID NO: 2457 - protein, 15 aa, Artificial Sequence
  Synthetic
GETFVTHSKGLYRKC

SEQ ID NO: 2458 - protein, 15 aa, Artificial Sequence
  Synthetic
ADAVIKTLQPVSELL

SEQ ID NO: 2459 - protein, 15 aa, Artificial Sequence
  Synthetic
ESDDYIATNGPLKVG

SEQ ID NO: 2460 - protein, 15 aa, Artificial Sequence
  Synthetic
IATNGPLKVGGSCVL

SEQ ID NO: 2461 - protein, 15 aa, Artificial Sequence
  Synthetic
SGHNLAKHCLHVVGP

SEQ ID NO: 2462 - protein, 15 aa, Artificial Sequence
  Synthetic
NLYDKLVSSFLEMKS

SEQ ID NO: 2463 - protein, 15 aa, Artificial Sequence
  Synthetic
ENLLLYIDINGNLHP

SEQ ID NO: 2464 - protein, 15 aa, Artificial Sequence
  Synthetic
KSAFYILPSIISNEK

SEQ ID NO: 2465 - protein, 15 aa, Artificial Sequence
  Synthetic
RFYFYTSKTTVASLI

SEQ ID NO: 2466 - protein, 15 aa, Artificial Sequence
  Synthetic
EAARYMRSLKVPATV

SEQ ID NO: 2467 - protein, 15 aa, Artificial Sequence
  Synthetic
LPNDDTLRVEAFEYY

SEQ ID NO: 2468 - protein, 15 aa, Artificial Sequence
  Synthetic
TLRVEAFEYYHTTDP

SEQ ID NO: 2469 - protein, 15 aa, Artificial Sequence
  Synthetic
HTTDPSFLGRYMSAL

SEQ ID NO: 2470 - protein, 15 aa, Artificial Sequence
  Synthetic
SFLGRYMSALNHTKK

SEQ ID NO: 2471 - protein, 15 aa, Artificial Sequence
  Synthetic
YMSALNHTKKWKYPQ

SEQ ID NO: 2472 - protein, 15 aa, Artificial Sequence
  Synthetic
NHTKKWKYPQVNGLT

SEQ ID NO: 2473 - protein, 15 aa, Artificial Sequence
  Synthetic
ESPFVMMSAPPAQYE

SEQ ID NO: 2474 - protein, 15 aa, Artificial Sequence
  Synthetic
YCIDGALLTKSSEYK

SEQ ID NO: 2475 - protein, 15 aa, Artificial Sequence
  Synthetic
DNFKFVCDNIKFADD

SEQ ID NO: 2476 - protein, 15 aa, Artificial Sequence
  Synthetic
LNQLTGYKKPASREL

SEQ ID NO: 2477 - protein, 15 aa, Artificial Sequence
  Synthetic
GYKKPASRELKVTFF

SEQ ID NO: 2478 - protein, 15 aa, Artificial Sequence
  Synthetic
ASRELKVTFFPDLNG

SEQ ID NO: 2479 - protein, 15 aa, Artificial Sequence
  Synthetic
PDLNGDVVAIDYKHY

SEQ ID NO: 2480 - protein, 15 aa, Artificial Sequence
  Synthetic
TPSFKKGAKLLHKPI

SEQ ID NO: 2481 - protein, 15 aa, Artificial Sequence
  Synthetic
VWHVNNATNKATYKP

SEQ ID NO: 2482 - protein, 15 aa, Artificial Sequence
  Synthetic
MAAYVDNSSLTIKKP

SEQ ID NO: 2483 - protein, 15 aa, Artificial Sequence
  Synthetic
NELSRVLGLKTLATH

SEQ ID NO: 2484 - protein, 15 aa, Artificial Sequence
  Synthetic
TFTRSTNSRIKASMP

SEQ ID NO: 2485 - protein, 15 aa, Artificial Sequence
  Synthetic
TNSRIKASMPTTIAK

SEQ ID NO: 2486 - protein, 15 aa, Artificial Sequence
  Synthetic
NTVKSVGKFCLEASF

SEQ ID NO: 2487 - protein, 15 aa, Artificial Sequence
  Synthetic
LEASFNYLKSPNFSK

SEQ ID NO: 2488 - protein, 15 aa, Artificial Sequence
  Synthetic
PNFSKLINIIIWFLL

SEQ ID NO: 2489 - protein, 15 aa, Artificial Sequence
  Synthetic
GSLIYSTAALGVLMS

SEQ ID NO: 2490 - protein, 15 aa, Artificial Sequence
  Synthetic
ISSFKWDLTAFGLVA

SEQ ID NO: 2491 - protein, 15 aa, Artificial Sequence
  Synthetic
WDLTAFGLVAEWFLA

SEQ ID NO: 2492 - protein, 15 aa, Artificial Sequence
  Synthetic
FGLVAEWFLAYILFT

SEQ ID NO: 2493 - protein, 15 aa, Artificial Sequence
  Synthetic
FDAYVNTFSSTFNVP

SEQ ID NO: 2494 - protein, 15 aa, Artificial Sequence
  Synthetic
SHNIALIWNVKDFMS

SEQ ID NO: 2495 - protein, 15 aa, Artificial Sequence
  Synthetic
KGGKIVNNWLKQLIK

SEQ ID NO: 2496 - protein, 15 aa, Artificial Sequence
  Synthetic
LFVAAIFYLITPVHV

SEQ ID NO: 2497 - protein, 15 aa, Artificial Sequence
  Synthetic
AVITREVGFVVPGLP

SEQ ID NO: 2498 - protein, 15 aa, Artificial Sequence
  Synthetic
VPGLPGTILRTTNGD

SEQ ID NO: 2499 - protein, 15 aa, Artificial Sequence
  Synthetic
FLHFLPRVFSAVGNI

SEQ ID NO: 2500 - protein, 15 aa, Artificial Sequence
  Synthetic
DTRYVLMDGSIIQFP

SEQ ID NO: 2501 - protein, 15 aa, Artificial Sequence
  Synthetic
SIVAGGIVAIVVTCL

SEQ ID NO: 2502 - protein, 15 aa, Artificial Sequence
  Synthetic
FGEYSHVVAFNTLLF

SEQ ID NO: 2503 - protein, 15 aa, Artificial Sequence
  Synthetic
NTLLFLMSFTVLCLT

SEQ ID NO: 2504 - protein, 15 aa, Artificial Sequence
  Synthetic
PVYSFLPGVYSVIYL

SEQ ID NO: 2505 - protein, 15 aa, Artificial Sequence
  Synthetic
YLTFYLTNDVSFLAH

SEQ ID NO: 2506 - protein, 15 aa, Artificial Sequence
  Synthetic
SFLAHIQWMVMFTPL

SEQ ID NO: 2507 - protein, 15 aa, Artificial Sequence
  Synthetic
IQWMVMFTPLVPFWI

SEQ ID NO: 2508 - protein, 15 aa, Artificial Sequence
  Synthetic
MFTPLVPFWITIAYI

SEQ ID NO: 2509 - protein, 15 aa, Artificial Sequence
  Synthetic
TIAYIICISTKHFYW

SEQ ID NO: 2510 - protein, 15 aa, Artificial Sequence
  Synthetic
CTFLLNKEMYLKLRS

SEQ ID NO: 2511 - protein, 15 aa, Artificial Sequence
  Synthetic
LTQYNRYLALYNKYK

SEQ ID NO: 2512 - protein, 15 aa, Artificial Sequence
  Synthetic
RYLALYNKYKYFSGA

SEQ ID NO: 2513 - protein, 15 aa, Artificial Sequence
  Synthetic
YREAACCHLAKALND

SEQ ID NO: 2514 - protein, 15 aa, Artificial Sequence
  Synthetic
CCHLAKALNDFSNSG

SEQ ID NO: 2515 - protein, 15 aa, Artificial Sequence
  Synthetic
FSNSGSDVLYQPPQT

SEQ ID NO: 2516 - protein, 15 aa, Artificial Sequence
  Synthetic
SDVLYQPPQTSITSA

SEQ ID NO: 2517 - protein, 15 aa, Artificial Sequence
  Synthetic
NHNFLVQAGNVQLRV

SEQ ID NO: 2518 - protein, 15 aa, Artificial Sequence
  Synthetic
QNCVLKLKVDTANPK

SEQ ID NO: 2519 - protein, 15 aa, Artificial Sequence
  Synthetic
LLVLVQSTQWSLFFF

SEQ ID NO: 2520 - protein, 15 aa, Artificial Sequence
  Synthetic
SLFFFLYENAFLPFA

SEQ ID NO: 2521 - protein, 15 aa, Artificial Sequence
  Synthetic
LCLFLLPSLATVAYF

SEQ ID NO: 2522 - protein, 15 aa, Artificial Sequence
  Synthetic
TLVYKVYYGNALDQA

SEQ ID NO: 2523 - protein, 15 aa, Artificial Sequence
  Synthetic
DAFKLNIKLLGVGGK

SEQ ID NO: 2524 - protein, 15 aa, Artificial Sequence
  Synthetic
RVESSSKLWAQCVQL

SEQ ID NO: 2525 - protein, 15 aa, Artificial Sequence
  Synthetic
SKLWAQCVQLHNDIL

SEQ ID NO: 2526 - protein, 15 aa, Artificial Sequence
  Synthetic
VLKKLKKSLNVAKSE

SEQ ID NO: 2527 - protein, 15 aa, Artificial Sequence
  Synthetic
LIVTALRANSAVKLQ

SEQ ID NO: 2528 - protein, 15 aa, Artificial Sequence
  Synthetic
SDFVRATATIPIQAS

SEQ ID NO: 2529 - protein, 15 aa, Artificial Sequence
  Synthetic
ALLAVFQSASKIITL

SEQ ID NO: 2530 - protein, 15 aa, Artificial Sequence
  Synthetic
KIITLKKRWQLALSK

SEQ ID NO: 2531 - protein, 15 aa, Artificial Sequence
  Synthetic
CNLLLLFVTVYSHLL

SEQ ID NO: 2532 - protein, 15 aa, Artificial Sequence
  Synthetic
LVAAGLEAPFLYLYA

SEQ ID NO: 2533 - protein, 15 aa, Artificial Sequence
  Synthetic
LEAPFLYLYALVYFL

SEQ ID NO: 2534 - protein, 15 aa, Artificial Sequence
  Synthetic
LVYFLQSINFVRIIM

SEQ ID NO: 2535 - protein, 15 aa, Artificial Sequence
  Synthetic
VRIIMRLWLCWKCRS

SEQ ID NO: 2536 - protein, 15 aa, Artificial Sequence
  Synthetic
RLWLCWKCRSKNPLL

SEQ ID NO: 2537 - protein, 15 aa, Artificial Sequence
  Synthetic
KNPLLYDANYFLCWH

SEQ ID NO: 2538 - protein, 15 aa, Artificial Sequence
  Synthetic
YDANYFLCWHTNCYD

SEQ ID NO: 2539 - protein, 15 aa, Artificial Sequence
  Synthetic
FLCWHTNCYDYCIPY

SEQ ID NO: 2540 - protein, 15 aa, Artificial Sequence
  Synthetic
TNCYDYCIPYNSVTS

SEQ ID NO: 2541 - protein, 15 aa, Artificial Sequence
  Synthetic
YFTSDYYQLYSTQLS

SEQ ID NO: 2542 - protein, 15 aa, Artificial Sequence
  Synthetic
TDTGVEHVTFFIYNK

SEQ ID NO: 2543 - protein, 15 aa, Artificial Sequence
  Synthetic
EHVTFFIYNKIVDEP

SEQ ID NO: 2544 - protein, 15 aa, Artificial Sequence
  Synthetic
FIYNKIVDEPEEHVQ

SEQ ID NO: 2545 - protein, 15 aa, Artificial Sequence
  Synthetic
GSSGVVNPVMEPIYD

SEQ ID NO: 2546 - protein, 15 aa, Artificial Sequence
  Synthetic
MFHLVDFQVTIAEIL

SEQ ID NO: 2547 - protein, 15 aa, Artificial Sequence
  Synthetic
IAEILLIIMRTFKVS

SEQ ID NO: 2548 - protein, 15 aa, Artificial Sequence
  Synthetic
AEILLIIMRTFKVSI

SEQ ID NO: 2549 - protein, 15 aa, Artificial Sequence
  Synthetic
LIIMRTFKVSIWNLD

SEQ ID NO: 2550 - protein, 15 aa, Artificial Sequence
  Synthetic
TFKVSIWNLDYIINL

SEQ ID NO: 2551 - protein, 15 aa, Artificial Sequence
  Synthetic
YIINLIIKNLSKSLT

SEQ ID NO: 2552 - protein, 15 aa, Artificial Sequence
  Synthetic
MKIILFLALITLATC

SEQ ID NO: 2553 - protein, 15 aa, Artificial Sequence
  Synthetic
IILFLALITLATCEL

SEQ ID NO: 2554 - protein, 18 aa, Artificial Sequence
  Synthetic
DGVKHVYQLRARSVSPKL

SEQ ID NO: 2555 - protein, 15 aa, Artificial Sequence
  Synthetic
VKHVYQLRARSVSPK

SEQ ID NO: 2556 - protein, 15 aa, Artificial Sequence
  Synthetic
LYSPIFLIVAAIVFI

SEQ ID NO: 2557 - protein, 15 aa, Artificial Sequence
  Synthetic
SPIFLIVAAIVFITL

SEQ ID NO: 2558 - protein, 15 aa, Artificial Sequence
  Synthetic
DFYLCFLAFLLFLVL

SEQ ID NO: 2559 - protein, 15 aa, Artificial Sequence
  Synthetic
MKFLVFLGIITTVAA

SEQ ID NO: 2560 - protein, 15 aa, Artificial Sequence
  Synthetic
FLGIITTVAAFHQEC

SEQ ID NO: 2561 - protein, 15 aa, Artificial Sequence
  Synthetic
TTVAAFHQECSLQSC

SEQ ID NO: 2562 - protein, 15 aa, Artificial Sequence
  Synthetic
FHQECSLQSCTQHQP

SEQ ID NO: 2563 - protein, 15 aa, Artificial Sequence
  Synthetic
SLQSCTQHQPYVVDD

SEQ ID NO: 2564 - protein, 15 aa, Artificial Sequence
  Synthetic
ARKSAPLIELCVDEA

SEQ ID NO: 2565 - protein, 15 aa, Artificial Sequence
  Synthetic
PLIELCVDEAGSKSP

SEQ ID NO: 2566 - protein, 15 aa, Artificial Sequence
  Synthetic
CVDEAGSKSPIQYID

SEQ ID NO: 2567 - protein, 15 aa, Artificial Sequence
  Synthetic
IQYIDIGNYTVSCLP

SEQ ID NO: 2568 - protein, 15 aa, Artificial Sequence
  Synthetic
QEPKLGSLVVRCSFY

SEQ ID NO: 2569 - protein, 15 aa, Artificial Sequence
  Synthetic
EDFLEYHDVRVVLDF

SEQ ID NO: 2570 - protein, 15 aa, Artificial Sequence
  Synthetic
DFLEYHDVRVVLDFI

SEQ ID NO: 2571 - protein, 15 aa, Artificial Sequence
  Synthetic
MFVFLVLLPLVSSQC

SEQ ID NO: 2572 - protein, 15 aa, Artificial Sequence
  Synthetic
VLLPLVSSQCVNLTT

SEQ ID NO: 2573 - protein, 15 aa, Artificial Sequence
  Synthetic
VSSQCVNLTTRTQLP

SEQ ID NO: 2574 - protein, 15 aa, Artificial Sequence
  Synthetic
VNLTTRTQLPPAYTN

SEQ ID NO: 2575 - protein, 15 aa, Artificial Sequence
  Synthetic
RTQLPPAYTNSFTRG

SEQ ID NO: 2576 - protein, 15 aa, Artificial Sequence
  Synthetic
PAYTNSFTRGVYYPD

SEQ ID NO: 2577 - protein, 15 aa, Artificial Sequence
  Synthetic
SFTRGVYYPDKVFRS

SEQ ID NO: 2578 - protein, 15 aa, Artificial Sequence
  Synthetic
VYYPDKVFRSSVLHS

SEQ ID NO: 2579 - protein, 15 aa, Artificial Sequence
  Synthetic
KVFRSSVLHSTQDLF

SEQ ID NO: 2580 - protein, 15 aa, Artificial Sequence
  Synthetic
SVLHSTQDLFLPFFS

SEQ ID NO: 2581 - protein, 15 aa, Artificial Sequence
  Synthetic
TQDLFLPFFSNVTWF

SEQ ID NO: 2582 - protein, 15 aa, Artificial Sequence
  Synthetic
LPFFSNVTWFHVISG

SEQ ID NO: 2583 - protein, 15 aa, Artificial Sequence
  Synthetic
NVTWFHVISGTNGTK

SEQ ID NO: 2584 - protein, 15 aa, Artificial Sequence
  Synthetic
HVISGTNGTKRFDNP

SEQ ID NO: 2585 - protein, 15 aa, Artificial Sequence
  Synthetic
SGTNGTKRFDNPVLP

SEQ ID NO: 2586 - protein, 15 aa, Artificial Sequence
  Synthetic
TKRFDNPVLPFNDGV

SEQ ID NO: 2587 - protein, 15 aa, Artificial Sequence
  Synthetic
NPVLPFNDGVYFASI

SEQ ID NO: 2588 - protein, 15 aa, Artificial Sequence
  Synthetic
FNDGVYFASIEKSNI

SEQ ID NO: 2589 - protein, 15 aa, Artificial Sequence
  Synthetic
YFASIEKSNIIRGWI

SEQ ID NO: 2590 - protein, 15 aa, Artificial Sequence
  Synthetic
EKSNIIRGWIFGTTL

SEQ ID NO: 2591 - protein, 15 aa, Artificial Sequence
  Synthetic
IRGWIFGTTLDSKTQ

SEQ ID NO: 2592 - protein, 15 aa, Artificial Sequence
  Synthetic
FGTTLDSKTQSLLIV

SEQ ID NO: 2593 - protein, 15 aa, Artificial Sequence
  Synthetic
DSKTQSLLIVNNATN

SEQ ID NO: 2594 - protein, 15 aa, Artificial Sequence
  Synthetic
SLLIVNNATNVVIKV

SEQ ID NO: 2595 - protein, 15 aa, Artificial Sequence
  Synthetic
NNATNVVIKVCEFQF

SEQ ID NO: 2596 - protein, 15 aa, Artificial Sequence
  Synthetic
VVIKVCEFQFCNDPF

SEQ ID NO: 2597 - protein, 15 aa, Artificial Sequence
  Synthetic
CEFQFCNDPFLDHKN

SEQ ID NO: 2598 - protein, 15 aa, Artificial Sequence
  Synthetic
CNDPFLDHKNNKSWM

SEQ ID NO: 2599 - protein, 15 aa, Artificial Sequence
  Synthetic
LDHKNNKSWMESEFR

SEQ ID NO: 2600 - protein, 15 aa, Artificial Sequence
  Synthetic
KNNKSWMESEFRVYS

SEQ ID NO: 2601 - protein, 15 aa, Artificial Sequence
  Synthetic
SWMESEFRVYSSANN

SEQ ID NO: 2602 - protein, 15 aa, Artificial Sequence
  Synthetic
EFRVYSSANNCTFEY

SEQ ID NO: 2603 - protein, 15 aa, Artificial Sequence
  Synthetic
SSANNCTFEYVSQPF

SEQ ID NO: 2604 - protein, 15 aa, Artificial Sequence
  Synthetic
CTFEYVSQPFLMDLE

SEQ ID NO: 2605 - protein, 15 aa, Artificial Sequence
  Synthetic
VSQPFLMDLEGKQGN

SEQ ID NO: 2606 - protein, 15 aa, Artificial Sequence
  Synthetic
LMDLEGKQGNFKNLR

SEQ ID NO: 2607 - protein, 15 aa, Artificial Sequence
  Synthetic
GKQGNFKNLREFVFK

SEQ ID NO: 2608 - protein, 15 aa, Artificial Sequence
  Synthetic
FKNLREFVFKNIDGY

SEQ ID NO: 2609 - protein, 15 aa, Artificial Sequence
  Synthetic
EFVFKNIDGYFKIYS

SEQ ID NO: 2610 - protein, 15 aa, Artificial Sequence
  Synthetic
NIDGYFKIYSKHTPI

SEQ ID NO: 2611 - protein, 15 aa, Artificial Sequence
  Synthetic
FKIYSKHTPIIVREP

SEQ ID NO: 2612 - protein, 15 aa, Artificial Sequence
  Synthetic
KHTPIIVREPEDLPQ

SEQ ID NO: 2613 - protein, 15 aa, Artificial Sequence
  Synthetic
IVREPEDLPQGFSAL

SEQ ID NO: 2614 - protein, 15 aa, Artificial Sequence
  Synthetic
EDLPQGFSALEPLVD

SEQ ID NO: 2615 - protein, 15 aa, Artificial Sequence
  Synthetic
GFSALEPLVDLPIGI

SEQ ID NO: 2616 - protein, 15 aa, Artificial Sequence
  Synthetic
FYVYSRVKNLNSSRV

SEQ ID NO: 2617 - protein, 15 aa, Artificial Sequence
  Synthetic
QFAYANRNRFLYIIK

SEQ ID NO: 2618 - protein, 15 aa, Artificial Sequence
  Synthetic
VLAAVYRINWITGGI

SEQ ID NO: 2619 - protein, 15 aa, Artificial Sequence
  Synthetic
YRINWITGGIAIAMA

SEQ ID NO: 2620 - protein, 15 aa, Artificial Sequence
  Synthetic
CLVGLMWLSYFIASF

SEQ ID NO: 2621 - protein, 15 aa, Artificial Sequence
  Synthetic
MWLSYFIASFRLFAR

SEQ ID NO: 2622 - protein, 15 aa, Artificial Sequence
  Synthetic
TNILLNVPLHGTILT

SEQ ID NO: 2623 - protein, 15 aa, Artificial Sequence
  Synthetic
SELVIGAVILRGHLR

SEQ ID NO: 2624 - protein, 18 aa, Artificial Sequence
  Synthetic
GAVILRGHLRIAGHHLGR

SEQ ID NO: 2625 - protein, 15 aa, Artificial Sequence
  Synthetic
LRGHLRIAGHHLGRC

SEQ ID NO: 2626 - protein, 15 aa, Artificial Sequence
  Synthetic
RGHLRIAGHHLGRCD

SEQ ID NO: 2627 - protein, 15 aa, Artificial Sequence
  Synthetic
IAGHHLGRCDIKDLP

SEQ ID NO: 2628 - protein, 15 aa, Artificial Sequence
  Synthetic
LGRCDIKDLPKEITV

SEQ ID NO: 2629 - protein, 15 aa, Artificial Sequence
  Synthetic
IKDLPKEITVATSRT

SEQ ID NO: 2630 - protein, 15 aa, Artificial Sequence
  Synthetic
KEITVATSRTLSYYK

SEQ ID NO: 2631 - protein, 17 aa, Artificial Sequence
  Synthetic
TSRTLSYYKLGASQRVA

SEQ ID NO: 2632 - protein, 15 aa, Artificial Sequence
  Synthetic
SRTLSYYKLGASQRV

SEQ ID NO: 2633 - protein, 15 aa, Artificial Sequence
  Synthetic
LSYYKLGASQRVAGD

SEQ ID NO: 2634 - protein, 15 aa, Artificial Sequence
  Synthetic
SYYKLGASQRVAGDS

SEQ ID NO: 2635 - protein, 15 aa, Artificial Sequence
  Synthetic
LGASQRVAGDSGFAA

SEQ ID NO: 2636 - protein, 15 aa, Artificial Sequence
  Synthetic
SGFAAYSRYRIGNYK

SEQ ID NO: 2637 - protein, 15 aa, Artificial Sequence
  Synthetic
ASWFTALTQHGKEDL

SEQ ID NO: 2638 - protein, 15 aa, Artificial Sequence
  Synthetic
SWFTALTQHGKEDLK

SEQ ID NO: 2639 - protein, 15 aa, Artificial Sequence
  Synthetic
DDQIGYYRRATRRIR

SEQ ID NO: 2640 - protein, 15 aa, Artificial Sequence
  Synthetic
IGYYRRATRRIRGGD

SEQ ID NO: 2641 - protein, 15 aa, Artificial Sequence
  Synthetic
YYRRATRRIRGGDGK

SEQ ID NO: 2642 - protein, 15 aa, Artificial Sequence
  Synthetic
MKDLSPRWYFYYLGT

SEQ ID NO: 2643 - protein, 15 aa, Artificial Sequence
  Synthetic
RWYFYYLGTGPEAGL

SEQ ID NO: 2644 - protein, 15 aa, Artificial Sequence
  Synthetic
NKDGIIWVATEGALN

SEQ ID NO: 2645 - protein, 15 aa, Artificial Sequence
  Synthetic
KDGIIWVATEGALNT

SEQ ID NO: 2646 - protein, 15 aa, Artificial Sequence
  Synthetic
AIVLQLPQGTTLPKG

SEQ ID NO: 2647 - protein, 15 aa, Artificial Sequence
  Synthetic
AGNGGDAALALLLLD

SEQ ID NO: 2648 - protein, 15 aa, Artificial Sequence
  Synthetic
DAALALLLLDRLNQL

SEQ ID NO: 2649 - protein, 15 aa, Artificial Sequence
  Synthetic
LLLLDRLNQLESKMS

SEQ ID NO: 2650 - protein, 15 aa, Artificial Sequence
  Synthetic
AAEASKKPRQKRTAT

SEQ ID NO: 2651 - protein, 15 aa, Artificial Sequence
  Synthetic
KKPRQKRTATKAYNV

SEQ ID NO: 2652 - protein, 15 aa, Artificial Sequence
  Synthetic
KRTATKAYNVTQAFG

SEQ ID NO: 2653 - protein, 15 aa, Artificial Sequence
  Synthetic
KAYNVTQAFGRRGPE

SEQ ID NO: 2654 - protein, 15 aa, Artificial Sequence
  Synthetic
LIRQGTDYKHWPQIA

SEQ ID NO: 2655 - protein, 15 aa, Artificial Sequence
  Synthetic
YKHWPQIAQFAPSAS

SEQ ID NO: 2656 - protein, 15 aa, Artificial Sequence
  Synthetic
WPQIAQFAPSASAFF

SEQ ID NO: 2657 - protein, 15 aa, Artificial Sequence
  Synthetic
ASAFFGMSRIGMEVT

SEQ ID NO: 2658 - protein, 20 aa, Artificial Sequence
  Synthetic
GMEVTPSGTWLTYTGAIKLD

SEQ ID NO: 2659 - protein, 15 aa, Artificial Sequence
  Synthetic
PSGTWLTYTGAIKLD

SEQ ID NO: 2660 - protein, 15 aa, Artificial Sequence
  Synthetic
GTWLTYTGAIKLDDK

SEQ ID NO: 2661 - protein, 15 aa, Artificial Sequence
  Synthetic
FKDQVILLNKHIDAY

SEQ ID NO: 2662 - protein, 15 aa, Artificial Sequence
  Synthetic
ILLNKHIDAYKTFPP

SEQ ID NO: 2663 - protein, 15 aa, Artificial Sequence
  Synthetic
LMIERFVSLAIDAYP

SEQ ID NO: 2664 - protein, 15 aa, Artificial Sequence
  Synthetic
LDDFVEIIKSQDLSV

SEQ ID NO: 2665 - protein, 15 aa, Artificial Sequence
  Synthetic
KVTFFPDLNGDVVAI

SEQ ID NO: 2666 - protein, 15 aa, Artificial Sequence
  Synthetic
KHFYWFFSNYLKRRV

SEQ ID NO: 2667 - protein, 15 aa, Artificial Sequence
  Synthetic
NRYFRLTLGVYDYLV

SEQ ID NO: 2668 - protein, 15 aa, Artificial Sequence
  Synthetic
INVFAFPFTIYSLLL

SEQ ID NO: 2669 - protein, 15 aa, Artificial Sequence
  Synthetic
FMRIFTIGTVTLKQG

SEQ ID NO: 2670 - protein, 15 aa, Artificial Sequence
  Synthetic
KKRWQLALSKGVHFV

SEQ ID NO: 2671 - protein, 15 aa, Artificial Sequence
  Synthetic
LYLYALVYFLQSINF

SEQ ID NO: 2672 - protein, 15 aa, Artificial Sequence
  Synthetic
QSINFVRIIMRLWLC

SEQ ID NO: 2673 - protein, 15 aa, Artificial Sequence
  Synthetic
IWNLDYIINLIIKNL

SEQ ID NO: 2674 - protein, 15 aa, Artificial Sequence
  Synthetic
QEEVQELYSPIFLIV

SEQ ID NO: 2675 - protein, 15 aa, Artificial Sequence
  Synthetic
TQHQPYVVDDPCPIH

SEQ ID NO: 2676 - protein, 15 aa, Artificial Sequence
  Synthetic
YVVDDPCPIHFYSKW

SEQ ID NO: 2677 - protein, 15 aa, Artificial Sequence
  Synthetic
PCPIHFYSKWYIRVG

SEQ ID NO: 2678 - protein, 15 aa, Artificial Sequence
  Synthetic
FYSKWYIRVGARKSA

SEQ ID NO: 2679 - protein, 15 aa, Artificial Sequence
  Synthetic
SKWYIRVGARKSAPL

SEQ ID NO: 2680 - protein, 15 aa, Artificial Sequence
  Synthetic
YIRVGARKSAPLIEL

SEQ ID NO: 2681 - protein, 15 aa, Artificial Sequence
  Synthetic
IGNYTVSCLPFTINC

SEQ ID NO: 2682 - protein, 15 aa, Artificial Sequence
  Synthetic
FTINCQEPKLGSLVV

SEQ ID NO: 2683 - protein, 15 aa, Artificial Sequence
  Synthetic
GSLVVRCSFYEDFLE

SEQ ID NO: 2684 - protein, 15 aa, Artificial Sequence
  Synthetic
RCSFYEDFLEYHDVR

SEQ ID NO: 2685 - skipped

SEQ ID NO: 2686 - protein, 15 aa, Artificial Sequence
  Synthetic
SEETGTLIVNSVLLF

SEQ ID NO: 2687 - protein, 15 aa, Artificial Sequence
  Synthetic
FLLVTLAILTALRLC

SEQ ID NO: 2688 - protein, 15 aa, Artificial Sequence
  Synthetic
LAILTALRLCAYCCN

SEQ ID NO: 2689 - protein, 15 aa, Artificial Sequence
  Synthetic
EELKKLLEQWNLVIG

SEQ ID NO: 2690 - protein, 15 aa, Artificial Sequence
  Synthetic
LLEQWNLVIGFLFLT

SEQ ID NO: 2691 - protein, 15 aa, Artificial Sequence
  Synthetic
NLVIGFLFLTWICLL

SEQ ID NO: 2692 - protein, 15 aa, Artificial Sequence
  Synthetic
FLFLTWICLLQFAYA

SEQ ID NO: 2693 - protein, 15 aa, Artificial Sequence
  Synthetic
WICLLQFAYANRNRF

SEQ ID NO: 2694 - protein, 15 aa, Artificial Sequence
  Synthetic
NRNRFLYIIKLIFLW

SEQ ID NO: 2695 - protein, 15 aa, Artificial Sequence
  Synthetic
LYIIKLIFLWLLWPV

SEQ ID NO: 2696 - protein, 15 aa, Artificial Sequence
  Synthetic
LIFLWLLWPVTLACF

SEQ ID NO: 2697 - protein, 15 aa, Artificial Sequence
  Synthetic
LLWPVTLACFVLAAV

SEQ ID NO: 2698 - protein, 15 aa, Artificial Sequence
  Synthetic
ITGGIAIAMACLVGL

SEQ ID NO: 2699 - protein, 15 aa, Artificial Sequence
  Synthetic
AIAMACLVGLMWLSY

SEQ ID NO: 2700 - protein, 15 aa, Artificial Sequence
  Synthetic
FIASFRLFARTRSMW

SEQ ID NO: 2701 - protein, 15 aa, Artificial Sequence
  Synthetic
RLFARTRSMWSFNPE

SEQ ID NO: 2702 - protein, 15 aa, Artificial Sequence
  Synthetic
TRSMWSFNPETNILL

SEQ ID NO: 2703 - protein, 15 aa, Artificial Sequence
  Synthetic
SFNPETNILLNVPLH

SEQ ID NO: 2704 - protein, 15 aa, Artificial Sequence
  Synthetic
NVPLHGTILTRPLLE

SEQ ID NO: 2705 - protein, 15 aa, Artificial Sequence
  Synthetic
GTILTRPLLESELVI

SEQ ID NO: 2706 - protein, 15 aa, Artificial Sequence
  Synthetic
RPLLESELVIGAVIL

SEQ ID NO: 2707 - protein, 15 aa, Artificial Sequence
  Synthetic
GAVILRGHLRIAGHH

SEQ ID NO: 2708 - protein, 15 aa, Artificial Sequence
  Synthetic
LRIAGHHLGRCDIKD

SEQ ID NO: 2709 - protein, 15 aa, Artificial Sequence
  Synthetic
ATSRTLSYYKLGASQ

SEQ ID NO: 2710 - protein, 15 aa, Artificial Sequence
  Synthetic
RVAGDSGFAAYSRYR

SEQ ID NO: 2711 - protein, 15 aa, Artificial Sequence
  Synthetic
YSRYRIGNYKLNTDH

SEQ ID NO: 2712 - protein, 15 aa, Artificial Sequence
  Synthetic
IGNYKLNTDHSSSSD

SEQ ID NO: 2713 - protein, 15 aa, Artificial Sequence
  Synthetic
LNTDHSSSSDNIALL

SEQ ID NO: 2714 - protein, 15 aa, Artificial Sequence
  Synthetic
PQNQRNAPRITFGGP

SEQ ID NO: 2715 - protein, 15 aa, Artificial Sequence
  Synthetic
NAPRITFGGPSDSTG

SEQ ID NO: 2716 - protein, 15 aa, Artificial Sequence
  Synthetic
TFGGPSDSTGSNQNG

SEQ ID NO: 2717 - protein, 15 aa, Artificial Sequence
  Synthetic
LTQHGKEDLKFPRGQ

SEQ ID NO: 2718 - protein, 15 aa, Artificial Sequence
  Synthetic
FPRGQGVPINTNSSP

SEQ ID NO: 2719 - protein, 15 aa, Artificial Sequence
  Synthetic
GVPINTNSSPDDQIG

SEQ ID NO: 2720 - protein, 15 aa, Artificial Sequence
  Synthetic
TRRIRGGDGKMKDLS

SEQ ID NO: 2721 - protein, 15 aa, Artificial Sequence
  Synthetic
GGDGKMKDLSPRWYF

SEQ ID NO: 2722 - protein, 20 aa, Artificial Sequence
  Synthetic
MKDLSPRWYFYYLGTGPEAG

SEQ ID NO: 2723 - protein, 15 aa, Artificial Sequence
  Synthetic
PRWYFYYLGTGPEAG

SEQ ID NO: 2724 - protein, 15 aa, Artificial Sequence
  Synthetic
LPYGANKDGIIWVAT

SEQ ID NO: 2725 - protein, 15 aa, Artificial Sequence
  Synthetic
IWVATEGALNTPKDH

SEQ ID NO: 2726 - protein, 15 aa, Artificial Sequence
  Synthetic
EGALNTPKDHIGTRN

SEQ ID NO: 2727 - protein, 15 aa, Artificial Sequence
  Synthetic
GKGQQQQGQTVTKKS

SEQ ID NO: 2728 - protein, 15 aa, Artificial Sequence
  Synthetic
KPRQKRTATKAYNVT

SEQ ID NO: 2729 - protein, 15 aa, Artificial Sequence
  Synthetic
TQAFGRRGPEQTQGN

SEQ ID NO: 2730 - protein, 15 aa, Artificial Sequence
  Synthetic
RRGPEQTQGNFGDQE

SEQ ID NO: 2731 - protein, 15 aa, Artificial Sequence
  Synthetic
FGDQELIRQGTDYKH

SEQ ID NO: 2732 - protein, 15 aa, Artificial Sequence
  Synthetic
TDYKHWPQIAQFAPS

SEQ ID NO: 2733 - protein, 15 aa, Artificial Sequence
  Synthetic
QFAPSASAFFGMSRI

SEQ ID NO: 2734 - protein, 15 aa, Artificial Sequence
  Synthetic
AFFGMSRIGMEVTPS

SEQ ID NO: 2735 - protein, 15 aa, Artificial Sequence
  Synthetic
GMEVTPSGTWLTYTG

SEQ ID NO: 2736 - protein, 18 aa, Artificial Sequence
  Synthetic
TWLTYTGAIKLDDKDPNF

SEQ ID NO: 2737 - protein, 15 aa, Artificial Sequence
  Synthetic
LTYTGAIKLDDKDPN

SEQ ID NO: 2738 - protein, 15 aa, Artificial Sequence
  Synthetic
AIKLDDKDPNFKDQV

SEQ ID NO: 2739 - protein, 18 aa, Artificial Sequence
  Synthetic
PNFKDQVILLNKHIDAYK

SEQ ID NO: 2740 - protein, 15 aa, Artificial Sequence
  Synthetic
HIDAYKTFPPTEPKK

SEQ ID NO: 2741 - protein, 15 aa, Artificial Sequence
  Synthetic
QKKQQTVTLLPAADL

SEQ ID NO: 2742 - protein, 16 aa, Artificial Sequence
  Synthetic
KQQTVTLLPAADLDDF

SEQ ID NO: 2743 - protein, 15 aa, Artificial Sequence
  Synthetic
TVTLLPAADLDDFSK

SEQ ID NO: 2744 - protein, 15 aa, Artificial Sequence
  Synthetic
AADLDDFSKQLQQSM

SEQ ID NO: 2745 - protein, 15 aa, Artificial Sequence
  Synthetic
VLSFCAFAVDAAKAY

SEQ ID NO: 2746 - protein, 15 aa, Artificial Sequence
  Synthetic
PDILRVYANLGERVR

SEQ ID NO: 2747 - protein, 15 aa, Artificial Sequence
  Synthetic
SLLMPILTLTRALTA

SEQ ID NO: 2748 - protein, 15 aa, Artificial Sequence
  Synthetic
HCANFNVLFSTVFPP

SEQ ID NO: 2749 - protein, 15 aa, Artificial Sequence
  Synthetic
NVLFSTVFPPTSFGP

SEQ ID NO: 2750 - protein, 15 aa, Artificial Sequence
  Synthetic
QDALFAYTKRNVIPT

SEQ ID NO: 2751 - protein, 15 aa, Artificial Sequence
  Synthetic
KLLKSIAATRGATVV

SEQ ID NO: 2752 - protein, 15 aa, Artificial Sequence
  Synthetic
IAATRGATVVIGTSK

SEQ ID NO: 2753 - protein, 15 aa, Artificial Sequence
  Synthetic
YPKCDRAMPNMLRIM

SEQ ID NO: 2754 - protein, 15 aa, Artificial Sequence
  Synthetic
RAMPNMLRIMASLVL

SEQ ID NO: 2755 - protein, 15 aa, Artificial Sequence
  Synthetic
SHRFYRLANECAQVL

SEQ ID NO: 2756 - protein, 15 aa, Artificial Sequence
  Synthetic
SEMVMCGGSLYVKPG

SEQ ID NO: 2757 - protein, 15 aa, Artificial Sequence
  Synthetic
FNICQAVTANVNALL

SEQ ID NO: 2758 - protein, 15 aa, Artificial Sequence
  Synthetic
AVTANVNALLSTDGN

SEQ ID NO: 2759 - protein, 15 aa, Artificial Sequence
  Synthetic
EFYAYLRKHFSMMIL

SEQ ID NO: 2760 - protein, 15 aa, Artificial Sequence
  Synthetic
LRKHFSMMILSDDAV

SEQ ID NO: 2761 - protein, 15 aa, Artificial Sequence
  Synthetic
GLVASIKNFKSVLYY

SEQ ID NO: 2762 - protein, 15 aa, Artificial Sequence
  Synthetic
KTDGTLMIERFVSLA

SEQ ID NO: 2763 - protein, 15 aa, Artificial Sequence
  Synthetic
FVSLAIDAYPLTKHP

SEQ ID NO: 2764 - protein, 15 aa, Artificial Sequence
  Synthetic
IDAYPLTKHPNQEYA

SEQ ID NO: 2765 - protein, 15 aa, Artificial Sequence
  Synthetic
DVFHLYLQYIRKLHD

SEQ ID NO: 2766 - protein, 15 aa, Artificial Sequence
  Synthetic
TSHKLVLSVNPYVCN

SEQ ID NO: 2767 - protein, 15 aa, Artificial Sequence
  Synthetic
ELHLSWEVGKPRPPL

SEQ ID NO: 2768 - protein, 15 aa, Artificial Sequence
  Synthetic
PRPPLNRNYVFTGYR

SEQ ID NO: 2769 - protein, 15 aa, Artificial Sequence
  Synthetic
FTGYRVTKNSKVQIG

SEQ ID NO: 2770 - protein, 15 aa, Artificial Sequence
  Synthetic
VTKNSKVQIGEYTFE

SEQ ID NO: 2771 - protein, 15 aa, Artificial Sequence
  Synthetic
VNARLRAKHYVYIGD

SEQ ID NO: 2772 - protein, 15 aa, Artificial Sequence
  Synthetic
ISPYNSQNAVASKIL

SEQ ID NO: 2773 - protein, 15 aa, Artificial Sequence
  Synthetic
NVNRFNVAITRAKVG

SEQ ID NO: 2774 - protein, 15 aa, Artificial Sequence
  Synthetic
NMFITREEAIRHVRA

SEQ ID NO: 2775 - protein, 15 aa, Artificial Sequence
  Synthetic
REEAIRHVRAWIGFD

SEQ ID NO: 2776 - protein, 15 aa, Artificial Sequence
  Synthetic
PLMYKGLPWNVVRIK

SEQ ID NO: 2777 - protein, 15 aa, Artificial Sequence
  Synthetic
EIIKSQDLSVVSKVV

SEQ ID NO: 2778 - protein, 15 aa, Artificial Sequence
  Synthetic
TQLCQYLNTLTLAVP

SEQ ID NO: 2779 - protein, 15 aa, Artificial Sequence
  Synthetic
AVMSLKEGQINDMIL

SEQ ID NO: 2780 - protein, 15 aa, Artificial Sequence
  Synthetic
KEGQINDMILSLLSK

SEQ ID NO: 2781 - protein, 15 aa, Artificial Sequence
  Synthetic
RENNRVVISSDVLVN

SEQ ID NO: 2782 - protein, 15 aa, Artificial Sequence
  Synthetic
PLNSIIKTIQPRVEK

SEQ ID NO: 2783 - protein, 15 aa, Artificial Sequence
  Synthetic
EEIAIILASFSASTS

SEQ ID NO: 2784 - protein, 15 aa, Artificial Sequence
  Synthetic
SPLYAFASEAARVVR

SEQ ID NO: 2785 - protein, 15 aa, Artificial Sequence
  Synthetic
AITILDGISQYSLRL

SEQ ID NO: 2786 - protein, 15 aa, Artificial Sequence
  Synthetic
QTFFKLVNKFLALCA

SEQ ID NO: 2787 - protein, 15 aa, Artificial Sequence
  Synthetic
GETFVTHSKGLYRKC

SEQ ID NO: 2788 - protein, 15 aa, Artificial Sequence
  Synthetic
ADAVIKTLQPVSELL

SEQ ID NO: 2789 - protein, 15 aa, Artificial Sequence
  Synthetic
ESDDYIATNGPLKVG

SEQ ID NO: 2790 - protein, 15 aa, Artificial Sequence
  Synthetic
IATNGPLKVGGSCVL

SEQ ID NO: 2791 - protein, 15 aa, Artificial Sequence
  Synthetic
SGHNLAKHCLHVVGP

SEQ ID NO: 2792 - protein, 15 aa, Artificial Sequence
  Synthetic
NLYDKLVSSFLEMKS

SEQ ID NO: 2793 - protein, 15 aa, Artificial Sequence
  Synthetic
ENLLLYIDINGNLHP

SEQ ID NO: 2794 - protein, 15 aa, Artificial Sequence
  Synthetic
KSAFYILPSIISNEK

SEQ ID NO: 2795 - protein, 15 aa, Artificial Sequence
  Synthetic
RFYFYTSKTTVASLI

SEQ ID NO: 2796 - protein, 15 aa, Artificial Sequence
  Synthetic
EAARYMRSLKVPATV

SEQ ID NO: 2797 - protein, 15 aa, Artificial Sequence
  Synthetic
LPNDDTLRVEAFEYY

SEQ ID NO: 2798 - protein, 15 aa, Artificial Sequence
  Synthetic
TLRVEAFEYYHTTDP

SEQ ID NO: 2799 - protein, 15 aa, Artificial Sequence
  Synthetic
HTTDPSFLGRYMSAL

SEQ ID NO: 2800 - protein, 15 aa, Artificial Sequence
  Synthetic
SFLGRYMSALNHTKK

SEQ ID NO: 2801 - protein, 15 aa, Artificial Sequence
  Synthetic
YMSALNHTKKWKYPQ

SEQ ID NO: 2802 - protein, 15 aa, Artificial Sequence
  Synthetic
NHTKKWKYPQVNGLT

SEQ ID NO: 2803 - protein, 15 aa, Artificial Sequence
  Synthetic
ESPFVMMSAPPAQYE

SEQ ID NO: 2804 - protein, 15 aa, Artificial Sequence
  Synthetic
YCIDGALLTKSSEYK

SEQ ID NO: 2805 - protein, 15 aa, Artificial Sequence
  Synthetic
DNFKFVCDNIKFADD

SEQ ID NO: 2806 - protein, 15 aa, Artificial Sequence
  Synthetic
LNQLTGYKKPASREL

SEQ ID NO: 2807 - protein, 15 aa, Artificial Sequence
  Synthetic
GYKKPASRELKVTFF

SEQ ID NO: 2808 - protein, 15 aa, Artificial Sequence
  Synthetic
ASRELKVTFFPDLNG

SEQ ID NO: 2809 - protein, 15 aa, Artificial Sequence
  Synthetic
PDLNGDVVAIDYKHY

SEQ ID NO: 2810 - protein, 15 aa, Artificial Sequence
  Synthetic
TPSFKKGAKLLHKPI

SEQ ID NO: 2811 - protein, 15 aa, Artificial Sequence
  Synthetic
VWHVNNATNKATYKP

SEQ ID NO: 2812 - protein, 15 aa, Artificial Sequence
  Synthetic
MAAYVDNSSLTIKKP

SEQ ID NO: 2813 - protein, 15 aa, Artificial Sequence
  Synthetic
NELSRVLGLKTLATH

SEQ ID NO: 2814 - protein, 15 aa, Artificial Sequence
  Synthetic
TFTRSTNSRIKASMP

SEQ ID NO: 2815 - protein, 15 aa, Artificial Sequence
  Synthetic
TNSRIKASMPTTIAK

SEQ ID NO: 2816 - protein, 15 aa, Artificial Sequence
  Synthetic
NTVKSVGKFCLEASF

SEQ ID NO: 2817 - protein, 15 aa, Artificial Sequence
  Synthetic
LEASFNYLKSPNFSK

SEQ ID NO: 2818 - protein, 15 aa, Artificial Sequence
  Synthetic
PNFSKLINIIIWFLL

SEQ ID NO: 2819 - protein, 15 aa, Artificial Sequence
  Synthetic
GSLIYSTAALGVLMS

SEQ ID NO: 2820 - protein, 15 aa, Artificial Sequence
  Synthetic
ISSFKWDLTAFGLVA

SEQ ID NO: 2821 - protein, 15 aa, Artificial Sequence
  Synthetic
WDLTAFGLVAEWFLA

SEQ ID NO: 2822 - protein, 15 aa, Artificial Sequence
  Synthetic
FGLVAEWFLAYILFT

SEQ ID NO: 2823 - protein, 15 aa, Artificial Sequence
  Synthetic
FDAYVNTFSSTFNVP

SEQ ID NO: 2824 - protein, 15 aa, Artificial Sequence
  Synthetic
SHNIALIWNVKDFMS

SEQ ID NO: 2825 - protein, 15 aa, Artificial Sequence
  Synthetic
KGGKIVNNWLKQLIK

SEQ ID NO: 2826 - protein, 15 aa, Artificial Sequence
  Synthetic
LFVAAIFYLITPVHV

SEQ ID NO: 2827 - protein, 15 aa, Artificial Sequence
  Synthetic
AVITREVGFVVPGLP

SEQ ID NO: 2828 - protein, 15 aa, Artificial Sequence
  Synthetic
VPGLPGTILRTTNGD

SEQ ID NO: 2829 - protein, 15 aa, Artificial Sequence
  Synthetic
FLHFLPRVFSAVGNI

SEQ ID NO: 2830 - protein, 15 aa, Artificial Sequence
  Synthetic
DTRYVLMDGSIIQFP

SEQ ID NO: 2831 - protein, 15 aa, Artificial Sequence
  Synthetic
SIVAGGIVAIVVTCL

SEQ ID NO: 2832 - protein, 15 aa, Artificial Sequence
  Synthetic
FGEYSHVVAFNTLLF

SEQ ID NO: 2833 - protein, 15 aa, Artificial Sequence
  Synthetic
NTLLFLMSFTVLCLT

SEQ ID NO: 2834 - protein, 15 aa, Artificial Sequence
  Synthetic
PVYSFLPGVYSVIYL

SEQ ID NO: 2835 - protein, 15 aa, Artificial Sequence
  Synthetic
YLTFYLTNDVSFLAH

SEQ ID NO: 2836 - protein, 15 aa, Artificial Sequence
  Synthetic
SFLAHIQWMVMFTPL

SEQ ID NO: 2837 - protein, 15 aa, Artificial Sequence
  Synthetic
IQWMVMFTPLVPFWI

SEQ ID NO: 2838 - protein, 15 aa, Artificial Sequence
  Synthetic
MFTPLVPFWITIAYI

SEQ ID NO: 2839 - protein, 15 aa, Artificial Sequence
  Synthetic
TIAYIICISTKHFYW

SEQ ID NO: 2840 - protein, 15 aa, Artificial Sequence
  Synthetic
CTFLLNKEMYLKLRS

SEQ ID NO: 2841 - protein, 15 aa, Artificial Sequence
  Synthetic
LTQYNRYLALYNKYK

SEQ ID NO: 2842 - protein, 15 aa, Artificial Sequence
  Synthetic
RYLALYNKYKYFSGA

SEQ ID NO: 2843 - protein, 15 aa, Artificial Sequence
  Synthetic
YREAACCHLAKALND

SEQ ID NO: 2844 - protein, 15 aa, Artificial Sequence
  Synthetic
CCHLAKALNDFSNSG

SEQ ID NO: 2845 - protein, 15 aa, Artificial Sequence
  Synthetic
FSNSGSDVLYQPPQT

SEQ ID NO: 2846 - protein, 15 aa, Artificial Sequence
  Synthetic
SDVLYQPPQTSITSA

SEQ ID NO: 2847 - protein, 15 aa, Artificial Sequence
  Synthetic
NHNFLVQAGNVQLRV

SEQ ID NO: 2848 - protein, 15 aa, Artificial Sequence
  Synthetic
QNCVLKLKVDTANPK

SEQ ID NO: 2849 - protein, 15 aa, Artificial Sequence
  Synthetic
LLVLVQSTQWSLFFF

SEQ ID NO: 2850 - protein, 15 aa, Artificial Sequence
  Synthetic
SLFFFLYENAFLPFA

SEQ ID NO: 2851 - protein, 15 aa, Artificial Sequence
  Synthetic
LCLFLLPSLATVAYF

SEQ ID NO: 2852 - protein, 15 aa, Artificial Sequence
  Synthetic
TLVYKVYYGNALDQA

SEQ ID NO: 2853 - protein, 15 aa, Artificial Sequence
  Synthetic
DAFKLNIKLLGVGGK

SEQ ID NO: 2854 - protein, 15 aa, Artificial Sequence
  Synthetic
RVESSSKLWAQCVQL

SEQ ID NO: 2855 - protein, 15 aa, Artificial Sequence
  Synthetic
SKLWAQCVQLHNDIL

SEQ ID NO: 2856 - protein, 15 aa, Artificial Sequence
  Synthetic
VLKKLKKSLNVAKSE

SEQ ID NO: 2857 - protein, 15 aa, Artificial Sequence
  Synthetic
LIVTALRANSAVKLQ

SEQ ID NO: 2858 - protein, 15 aa, Artificial Sequence
  Synthetic
SDFVRATATIPIQAS

SEQ ID NO: 2859 - protein, 15 aa, Artificial Sequence
  Synthetic
ALLAVFQSASKIITL

SEQ ID NO: 2860 - protein, 15 aa, Artificial Sequence
  Synthetic
KIITLKKRWQLALSK

SEQ ID NO: 2861 - protein, 15 aa, Artificial Sequence
  Synthetic
CNLLLLFVTVYSHLL

SEQ ID NO: 2862 - protein, 15 aa, Artificial Sequence
  Synthetic
LVAAGLEAPFLYLYA

SEQ ID NO: 2863 - protein, 15 aa, Artificial Sequence
  Synthetic
LEAPFLYLYALVYFL

SEQ ID NO: 2864 - protein, 15 aa, Artificial Sequence
  Synthetic
LVYFLQSINFVRIIM

SEQ ID NO: 2865 - protein, 15 aa, Artificial Sequence
  Synthetic
VRIIMRLWLCWKCRS

SEQ ID NO: 2866 - protein, 15 aa, Artificial Sequence
  Synthetic
RLWLCWKCRSKNPLL

SEQ ID NO: 2867 - protein, 15 aa, Artificial Sequence
  Synthetic
KNPLLYDANYFLCWH

SEQ ID NO: 2868 - protein, 15 aa, Artificial Sequence
  Synthetic
YDANYFLCWHTNCYD

SEQ ID NO: 2869 - protein, 15 aa, Artificial Sequence
  Synthetic
FLCWHTNCYDYCIPY

SEQ ID NO: 2870 - protein, 15 aa, Artificial Sequence
  Synthetic
TNCYDYCIPYNSVTS

SEQ ID NO: 2871 - protein, 15 aa, Artificial Sequence
  Synthetic
YFTSDYYQLYSTQLS

SEQ ID NO: 2872 - protein, 15 aa, Artificial Sequence
  Synthetic
TDTGVEHVTFFIYNK

SEQ ID NO: 2873 - protein, 15 aa, Artificial Sequence
  Synthetic
EHVTFFIYNKIVDEP

SEQ ID NO: 2874 - protein, 15 aa, Artificial Sequence
  Synthetic
FIYNKIVDEPEEHVQ

SEQ ID NO: 2875 - protein, 15 aa, Artificial Sequence
  Synthetic
GSSGVVNPVMEPIYD

SEQ ID NO: 2876 - protein, 15 aa, Artificial Sequence
  Synthetic
MFHLVDFQVTIAEIL

SEQ ID NO: 2877 - protein, 15 aa, Artificial Sequence
  Synthetic
IAEILLIIMRTFKVS

SEQ ID NO: 2878 - protein, 15 aa, Artificial Sequence
  Synthetic
AEILLIIMRTFKVSI

SEQ ID NO: 2879 - protein, 15 aa, Artificial Sequence
  Synthetic
LIIMRTFKVSIWNLD

SEQ ID NO: 2880 - protein, 15 aa, Artificial Sequence
  Synthetic
TFKVSIWNLDYIINL

SEQ ID NO: 2881 - protein, 15 aa, Artificial Sequence
  Synthetic
YIINLIIKNLSKSLT

SEQ ID NO: 2882 - protein, 15 aa, Artificial Sequence
  Synthetic
MKIILFLALITLATC

SEQ ID NO: 2883 - protein, 15 aa, Artificial Sequence
  Synthetic
IILFLALITLATCEL

SEQ ID NO: 2884 - protein, 18 aa, Artificial Sequence
  Synthetic
DGVKHVYQLRARSVSPKL

SEQ ID NO: 2885 - protein, 15 aa, Artificial Sequence
  Synthetic
VKHVYQLRARSVSPK

SEQ ID NO: 2886 - protein, 15 aa, Artificial Sequence
  Synthetic
LYSPIFLIVAAIVFI

SEQ ID NO: 2887 - protein, 15 aa, Artificial Sequence
  Synthetic
SPIFLIVAAIVFITL

SEQ ID NO: 2888 - protein, 15 aa, Artificial Sequence
  Synthetic
DFYLCFLAFLLFLVL

SEQ ID NO: 2889 - protein, 15 aa, Artificial Sequence
  Synthetic
MKFLVFLGIITTVAA

SEQ ID NO: 2890 - protein, 15 aa, Artificial Sequence
  Synthetic
FLGIITTVAAFHQEC

SEQ ID NO: 2891 - protein, 15 aa, Artificial Sequence
  Synthetic
TTVAAFHQECSLQSC

SEQ ID NO: 2892 - protein, 15 aa, Artificial Sequence
  Synthetic
FHQECSLQSCTQHQP

SEQ ID NO: 2893 - protein, 15 aa, Artificial Sequence
  Synthetic
SLQSCTQHQPYVVDD

SEQ ID NO: 2894 - protein, 15 aa, Artificial Sequence
  Synthetic
ARKSAPLIELCVDEA

SEQ ID NO: 2895 - protein, 15 aa, Artificial Sequence
  Synthetic
PLIELCVDEAGSKSP

SEQ ID NO: 2896 - protein, 15 aa, Artificial Sequence
  Synthetic
CVDEAGSKSPIQYID

SEQ ID NO: 2897 - protein, 15 aa, Artificial Sequence
  Synthetic
IQYIDIGNYTVSCLP

SEQ ID NO: 2898 - protein, 15 aa, Artificial Sequence
  Synthetic
QEPKLGSLVVRCSFY

SEQ ID NO: 2899 - protein, 15 aa, Artificial Sequence
  Synthetic
EDFLEYHDVRVVLDF

SEQ ID NO: 2900 - protein, 15 aa, Artificial Sequence
  Synthetic
DFLEYHDVRVVLDFI

SEQ ID NO: 2901 - protein, 9 aa, Artificial Sequence
  Synthetic
SLVKPSFYV

SEQ ID NO: 2902 - protein, 9 aa, Artificial Sequence
  Synthetic
YVYSRVKNL

SEQ ID NO: 2903 - protein, 9 aa, Artificial Sequence
  Synthetic
GTITVEELK

SEQ ID NO: 2904 - protein, 9 aa, Artificial Sequence
  Synthetic
KLLEQWNLV

SEQ ID NO: 2905 - protein, 9 aa, Artificial Sequence
  Synthetic
FLFLTWICL

SEQ ID NO: 2906 - protein, 9 aa, Artificial Sequence
  Synthetic
NRFLYIIKL

SEQ ID NO: 2907 - protein, 10 aa, Artificial Sequence
  Synthetic
TLACFVLAAV

SEQ ID NO: 2908 - protein, 9 aa, Artificial Sequence
  Synthetic
FVLAAVYRI

SEQ ID NO: 2909 - protein, 10 aa, Artificial Sequence
  Synthetic
RLFARTRSMW

SEQ ID NO: 2910 - protein, 9 aa, Artificial Sequence
  Synthetic
SMWSFNPET

SEQ ID NO: 2911 - protein, 10 aa, Artificial Sequence
  Synthetic
SELVIGAVIL

SEQ ID NO: 2912 - protein, 9 aa, Artificial Sequence
  Synthetic
AVILRGHLR

SEQ ID NO: 2913 - protein, 9 aa, Artificial Sequence
  Synthetic
ATSRTLSYY

SEQ ID NO: 2914 - protein, 10 aa, Artificial Sequence
  Synthetic
ATSRTLSYYK

SEQ ID NO: 2915 - protein, 9 aa, Artificial Sequence
  Synthetic
RYRIGNYKL

SEQ ID NO: 2916 - protein, 9 aa, Artificial Sequence
  Synthetic
QRNAPRITF

SEQ ID NO: 2917 - protein, 9 aa, Artificial Sequence
  Synthetic
NTASWFTAL

SEQ ID NO: 2918 - protein, 10 aa, Artificial Sequence
  Synthetic
KFPRGQGVPI

SEQ ID NO: 2919 - protein, 9 aa, Artificial Sequence
  Synthetic
FPRGQGVPI

SEQ ID NO: 2920 - protein, 10 aa, Artificial Sequence
  Synthetic
YYRRATRRIR

SEQ ID NO: 2921 - protein, 10 aa, Artificial Sequence
  Synthetic
RIRGGDGKMK

SEQ ID NO: 2922 - protein, 9 aa, Artificial Sequence
  Synthetic
KMKDLSPRW

SEQ ID NO: 2923 - protein, 10 aa, Artificial Sequence
  Synthetic
LSPRWYFYYL

SEQ ID NO: 2924 - protein, 9 aa, Artificial Sequence
  Synthetic
SPRWYFYYL

SEQ ID NO: 2925 - protein, 10 aa, Artificial Sequence
  Synthetic
GTGPEAGLPY

SEQ ID NO: 2926 - protein, 10 aa, Artificial Sequence
  Synthetic
ATEGALNTPK

SEQ ID NO: 2927 - protein, 10 aa, Artificial Sequence
  Synthetic
NPANNAAIVL

SEQ ID NO: 2928 - protein, 10 aa, Artificial Sequence
  Synthetic
VLQLPQGTTL

SEQ ID NO: 2929 - protein, 9 aa, Artificial Sequence
  Synthetic
LALLLLDRL

SEQ ID NO: 2930 - protein, 10 aa, Artificial Sequence
  Synthetic
LLLLDRLNQL

SEQ ID NO: 2931 - protein, 9 aa, Artificial Sequence
  Synthetic
LLLDRLNQL

SEQ ID NO: 2932 - protein, 10 aa, Artificial Sequence
  Synthetic
QQQQGQTVTK

SEQ ID NO: 2933 - protein, 9 aa, Artificial Sequence
  Synthetic
KPRQKRTAT

SEQ ID NO: 2934 - protein, 9 aa, Artificial Sequence
  Synthetic
KAYNVTQAF

SEQ ID NO: 2935 - protein, 9 aa, Artificial Sequence
  Synthetic
AQFAPSASA

SEQ ID NO: 2936 - protein, 10 aa, Artificial Sequence
  Synthetic
AQFAPSASAF

SEQ ID NO: 2937 - protein, 9 aa, Artificial Sequence
  Synthetic
ASAFFGMSR

SEQ ID NO: 2938 - protein, 9 aa, Artificial Sequence
  Synthetic
GMSRIGMEV

SEQ ID NO: 2939 - protein, 9 aa, Artificial Sequence
  Synthetic
MEVTPSGTW

SEQ ID NO: 2940 - protein, 10 aa, Artificial Sequence
  Synthetic
MEVTPSGTWL

SEQ ID NO: 2941 - protein, 9 aa, Artificial Sequence
  Synthetic
ILLNKHIDA

SEQ ID NO: 2942 - protein, 9 aa, Artificial Sequence
  Synthetic
KTFPPTEPK

SEQ ID NO: 2943 - protein, 10 aa, Artificial Sequence
  Synthetic
KTFPPTEPKK

SEQ ID NO: 2944 - protein, 9 aa, Artificial Sequence
  Synthetic
LPAADLDDF

SEQ ID NO: 2945 - protein, 9 aa, Artificial Sequence
  Synthetic
FSKQLQQSM

SEQ ID NO: 2946 - protein, 9 aa, Artificial Sequence
  Synthetic
VLSEARQHL

SEQ ID NO: 2947 - protein, 10 aa, Artificial Sequence
  Synthetic
TVLSFCAFAV

SEQ ID NO: 2948 - protein, 9 aa, Artificial Sequence
  Synthetic
DLKGKYVQI

SEQ ID NO: 2949 - protein, 10 aa, Artificial Sequence
  Synthetic
YTMADLVYAL

SEQ ID NO: 2950 - protein, 9 aa, Artificial Sequence
  Synthetic
TMADLVYAL

SEQ ID NO: 2951 - protein, 9 aa, Artificial Sequence
  Synthetic
LLMPILTLT

SEQ ID NO: 2952 - protein, 9 aa, Artificial Sequence
  Synthetic
KLFDRYFKY

SEQ ID NO: 2953 - protein, 9 aa, Artificial Sequence
  Synthetic
FVDGVPFVV

SEQ ID NO: 2954 - protein, 9 aa, Artificial Sequence
  Synthetic
ISDYDYYRY

SEQ ID NO: 2955 - protein, 9 aa, Artificial Sequence
  Synthetic
RQLLFVVEV

SEQ ID NO: 2956 - protein, 9 aa, Artificial Sequence
  Synthetic
VVDKYFDCY

SEQ ID NO: 2957 - protein, 9 aa, Artificial Sequence
  Synthetic
RLYYDSMSY

SEQ ID NO: 2958 - protein, 10 aa, Artificial Sequence
  Synthetic
MVMCGGSLYV

SEQ ID NO: 2959 - protein, 9 aa, Artificial Sequence
  Synthetic
DTDFVNEFY

SEQ ID NO: 2960 - protein, 9 aa, Artificial Sequence
  Synthetic
FYAYLRKHF

SEQ ID NO: 2961 - protein, 9 aa, Artificial Sequence
  Synthetic
RILGAGCFV

SEQ ID NO: 2962 - protein, 9 aa, Artificial Sequence
  Synthetic
LMIERFVSL

SEQ ID NO: 2963 - protein, 9 aa, Artificial Sequence
  Synthetic
LYLQYIRKL

SEQ ID NO: 2964 - protein, 9 aa, Artificial Sequence
  Synthetic
VLQAVGACV

SEQ ID NO: 2965 - protein, 9 aa, Artificial Sequence
  Synthetic
LVLSVNPYV

SEQ ID NO: 2966 - protein, 9 aa, Artificial Sequence
  Synthetic
KLFAAETLK

SEQ ID NO: 2967 - protein, 9 aa, Artificial Sequence
  Synthetic
KLSYGIATV

SEQ ID NO: 2968 - protein, 9 aa, Artificial Sequence
  Synthetic
VVYRGTTTY

SEQ ID NO: 2969 - protein, 10 aa, Artificial Sequence
  Synthetic
VVYRGTTTYK

SEQ ID NO: 2970 - protein, 10 aa, Artificial Sequence
  Synthetic
VYRGTTTYKL

SEQ ID NO: 2971 - protein, 9 aa, Artificial Sequence
  Synthetic
KLNVGDYFV

SEQ ID NO: 2972 - protein, 9 aa, Artificial Sequence
  Synthetic
SSNVANYQK

SEQ ID NO: 2973 - protein, 9 aa, Artificial Sequence
  Synthetic
VYIGDPAQL

SEQ ID NO: 2974 - protein, 9 aa, Artificial Sequence
  Synthetic
IVDTVSALV

SEQ ID NO: 2975 - protein, 9 aa, Artificial Sequence
  Synthetic
IPRRNVATL

SEQ ID NO: 2976 - protein, 9 aa, Artificial Sequence
  Synthetic
VLWAHGFEL

SEQ ID NO: 2977 - protein, 9 aa, Artificial Sequence
  Synthetic
TYACWHHSI

SEQ ID NO: 2978 - protein, 9 aa, Artificial Sequence
  Synthetic
AIMTRCLAV

SEQ ID NO: 2979 - protein, 10 aa, Artificial Sequence
  Synthetic
IEYPIIGDEL

SEQ ID NO: 2980 - protein, 9 aa, Artificial Sequence
  Synthetic
ALLADKFPV

SEQ ID NO: 2981 - protein, 9 aa, Artificial Sequence
  Synthetic
SYATHSDKF

SEQ ID NO: 2982 - protein, 9 aa, Artificial Sequence
  Synthetic
YLDAYNMMI

SEQ ID NO: 2983 - protein, 9 aa, Artificial Sequence
  Synthetic
MMISAGFSL

SEQ ID NO: 2984 - protein, 9 aa, Artificial Sequence
  Synthetic
KQFDTYNLW

SEQ ID NO: 2985 - protein, 9 aa, Artificial Sequence
  Synthetic
NLWNTFTRL

SEQ ID NO: 2986 - protein, 9 aa, Artificial Sequence
  Synthetic
KVDGVDVEL

SEQ ID NO: 2987 - protein, 10 aa, Artificial Sequence
  Synthetic
LLLDDFVEII

SEQ ID NO: 2988 - protein, 9 aa, Artificial Sequence
  Synthetic
MLWCKDGHV

SEQ ID NO: 2989 - protein, 9 aa, Artificial Sequence
  Synthetic
GVAMPNLYK

SEQ ID NO: 2990 - protein, 9 aa, Artificial Sequence
  Synthetic
KMQRMLLEK

SEQ ID NO: 2991 - protein, 9 aa, Artificial Sequence
  Synthetic
YLNTLTLAV

SEQ ID NO: 2992 - protein, 9 aa, Artificial Sequence
  Synthetic
TLIGDCATV

SEQ ID NO: 2993 - protein, 9 aa, Artificial Sequence
  Synthetic
KTIQPRVEK

SEQ ID NO: 2994 - protein, 9 aa, Artificial Sequence
  Synthetic
KLVNKFLAL

SEQ ID NO: 2995 - protein, 9 aa, Artificial Sequence
  Synthetic
VTNNTFTLK

SEQ ID NO: 2996 - protein, 9 aa, Artificial Sequence
  Synthetic
FGDDTVIEV

SEQ ID NO: 2997 - protein, 9 aa, Artificial Sequence
  Synthetic
PTDNYITTY

SEQ ID NO: 2998 - protein, 9 aa, Artificial Sequence
  Synthetic
QEILGTVSW

SEQ ID NO: 2999 - protein, 10 aa, Artificial Sequence
  Synthetic
TTDPSFLGRY

SEQ ID NO: 3000 - protein, 9 aa, Artificial Sequence
  Synthetic
YLATALLTL

SEQ ID NO: 3001 - protein, 9 aa, Artificial Sequence
  Synthetic
SAPPAQYEL

SEQ ID NO: 3002 - protein, 9 aa, Artificial Sequence
  Synthetic
NYMPYFFTL

SEQ ID NO: 3003 - protein, 9 aa, Artificial Sequence
  Synthetic
ASMPTTIAK

SEQ ID NO: 3004 - protein, 9 aa, Artificial Sequence
  Synthetic
ILFTRFFYV

SEQ ID NO: 3005 - protein, 9 aa, Artificial Sequence
  Synthetic
YIFFASFYY

SEQ ID NO: 3006 - protein, 10 aa, Artificial Sequence
  Synthetic
QLMCQPILLL

SEQ ID NO: 3007 - protein, 9 aa, Artificial Sequence
  Synthetic
STFNVPMEK

SEQ ID NO: 3008 - protein, 9 aa, Artificial Sequence
  Synthetic
FLPRVFSAV

SEQ ID NO: 3009 - protein, 9 aa, Artificial Sequence
  Synthetic
FSAVGNICY

SEQ ID NO: 3010 - protein, 10 aa, Artificial Sequence
  Synthetic
SLRPDTRYVL

SEQ ID NO: 3011 - protein, 9 aa, Artificial Sequence
  Synthetic
FLLNKEMYL

SEQ ID NO: 3012 - protein, 10 aa, Artificial Sequence
  Synthetic
TSEDMLNPNY

SEQ ID NO: 3013 - protein, 9 aa, Artificial Sequence
  Synthetic
TPKYKFVRI

SEQ ID NO: 3014 - protein, 9 aa, Artificial Sequence
  Synthetic
VRIQPGQTF

SEQ ID NO: 3015 - protein, 9 aa, Artificial Sequence
  Synthetic
FLNGSCGSV

SEQ ID NO: 3016 - protein, 9 aa, Artificial Sequence
  Synthetic
GTDLEGNFY

SEQ ID NO: 3017 - protein, 9 aa, Artificial Sequence
  Synthetic
VLAWLYAAV

SEQ ID NO: 3018 - protein, 9 aa, Artificial Sequence
  Synthetic
FLNRFTTTL

SEQ ID NO: 3019 - protein, 9 aa, Artificial Sequence
  Synthetic
SAFAMMFVK

SEQ ID NO: 3020 - protein, 9 aa, Artificial Sequence
  Synthetic
FLLPSLATV

SEQ ID NO: 3021 - protein, 9 aa, Artificial Sequence
  Synthetic
MPASWVMRI

SEQ ID NO: 3022 - protein, 9 aa, Artificial Sequence
  Synthetic
KLKDCVMYA

SEQ ID NO: 3023 - protein, 9 aa, Artificial Sequence
  Synthetic
SMWALIISV

SEQ ID NO: 3024 - protein, 9 aa, Artificial Sequence
  Synthetic
KLWAQCVQL

SEQ ID NO: 3025 - protein, 9 aa, Artificial Sequence
  Synthetic
SEFSSLPSY

SEQ ID NO: 3026 - protein, 10 aa, Artificial Sequence
  Synthetic
NTCDGTTFTY

SEQ ID NO: 3027 - protein, 10 aa, Artificial Sequence
  Synthetic
FTYASALWEI

SEQ ID NO: 3028 - protein, 10 aa, Artificial Sequence
  Synthetic
SALWEIQQVV

SEQ ID NO: 3029 - protein, 9 aa, Artificial Sequence
  Synthetic
ALWEIQQVV

SEQ ID NO: 3030 - protein, 9 aa, Artificial Sequence
  Synthetic
ALRANSAVK

SEQ ID NO: 3031 - protein, 9 aa, Artificial Sequence
  Synthetic
CTDDNALAY

SEQ ID NO: 3032 - protein, 10 aa, Artificial Sequence
  Synthetic
CTDDNALAYY

SEQ ID NO: 3033 - protein, 10 aa, Artificial Sequence
  Synthetic
YTELEPPCRF

SEQ ID NO: 3034 - protein, 9 aa, Artificial Sequence
  Synthetic
VTDTPKGPK

SEQ ID NO: 3035 - protein, 10 aa, Artificial Sequence
  Synthetic
MDLFMRIFTI

SEQ ID NO: 3036 - protein, 10 aa, Artificial Sequence
  Synthetic
FVRATATIPI

SEQ ID NO: 3037 - protein, 9 aa, Artificial Sequence
  Synthetic
IPIQASLPF

SEQ ID NO: 3038 - protein, 10 aa, Artificial Sequence
  Synthetic
IVGVALLAVF

SEQ ID NO: 3039 - protein, 9 aa, Artificial Sequence
  Synthetic
ALSKGVHFV

SEQ ID NO: 3040 - protein, 9 aa, Artificial Sequence
  Synthetic
YLYALVYFL

SEQ ID NO: 3041 - protein, 9 aa, Artificial Sequence
  Synthetic
VYFLQSINF

SEQ ID NO: 3042 - protein, 9 aa, Artificial Sequence
  Synthetic
LLYDANYFL

SEQ ID NO: 3043 - protein, 9 aa, Artificial Sequence
  Synthetic
FTSDYYQLY

SEQ ID NO: 3044 - protein, 9 aa, Artificial Sequence
  Synthetic
YYQLYSTQL

SEQ ID NO: 3045 - protein, 9 aa, Artificial Sequence
  Synthetic
HLVDFQVTI

SEQ ID NO: 3046 - protein, 10 aa, Artificial Sequence
  Synthetic
QLRARSVSPK

SEQ ID NO: 3047 - protein, 9 aa, Artificial Sequence
  Synthetic
RARSVSPKL

SEQ ID NO: 3048 - protein, 9 aa, Artificial Sequence
  Synthetic
KLFIRQEEV

SEQ ID NO: 3049 - protein, 10 aa, Artificial Sequence
  Synthetic
VFITLCFTLK

SEQ ID NO: 3050 - protein, 10 aa, Artificial Sequence
  Synthetic
IMLIIFWFSL

SEQ ID NO: 3051 - protein, 9 aa, Artificial Sequence
  Synthetic
IQYIDIGNY

SEQ ID NO: 3052 - protein, 9 aa, Artificial Sequence
  Synthetic
KLGSLVVRC

SEQ ID NO: 3053 - protein, 10 aa, Artificial Sequence
  Synthetic
LEYHDVRVVL

SEQ ID NO: 3054 - skipped

SEQ ID NO: 3055 - protein, 9 aa, Artificial Sequence
  Synthetic
SEETGTLIV

SEQ ID NO: 3056 - protein, 9 aa, Artificial Sequence
  Synthetic
FLLVTLAIL

SEQ ID NO: 3057 - protein, 9 aa, Artificial Sequence
  Synthetic
LVKPSFYVY

SEQ ID NO: 3058 - protein, 10 aa, Artificial Sequence
  Synthetic
FYVYSRVKNL

SEQ ID NO: 3059 - protein, 10 aa, Artificial Sequence
  Synthetic
NGTITVEELK

SEQ ID NO: 3060 - protein, 9 aa, Artificial Sequence
  Synthetic
WICLLQFAY

SEQ ID NO: 3061 - protein, 9 aa, Artificial Sequence
  Synthetic
FAYANRNRF

SEQ ID NO: 3062 - protein, 9 aa, Artificial Sequence
  Synthetic
AYANRNRFL

SEQ ID NO: 3063 - protein, 9 aa, Artificial Sequence
  Synthetic
YANRNRFLY

SEQ ID NO: 3064 - protein, 9 aa, Artificial Sequence
  Synthetic
ANRNRFLYI

SEQ ID NO: 3065 - protein, 9 aa, Artificial Sequence
  Synthetic
RNRFLYIIK

SEQ ID NO: 3066 - protein, 10 aa, Artificial Sequence
  Synthetic
RNRFLYIIKL

SEQ ID NO: 3067 - protein, 10 aa, Artificial Sequence
  Synthetic
RFLYIIKLIF

SEQ ID NO: 3068 - protein, 10 aa, Artificial Sequence
  Synthetic
FLWLLWPVTL

SEQ ID NO: 3069 - protein, 9 aa, Artificial Sequence
  Synthetic
WLLWPVTLA

SEQ ID NO: 3070 - protein, 9 aa, Artificial Sequence
  Synthetic
LLWPVTLAC

SEQ ID NO: 3071 - protein, 9 aa, Artificial Sequence
  Synthetic
LAAVYRINW

SEQ ID NO: 3072 - protein, 10 aa, Artificial Sequence
  Synthetic
LAAVYRINWI

SEQ ID NO: 3073 - protein, 9 aa, Artificial Sequence
  Synthetic
MACLVGLMW

SEQ ID NO: 3074 - protein, 9 aa, Artificial Sequence
  Synthetic
GLMWLSYFI

SEQ ID NO: 3075 - protein, 9 aa, Artificial Sequence
  Synthetic
LSYFIASFR

SEQ ID NO: 3076 - protein, 9 aa, Artificial Sequence
  Synthetic
IASFRLFAR

SEQ ID NO: 3077 - protein, 10 aa, Artificial Sequence
  Synthetic
FRLFARTRSM

SEQ ID NO: 3078 - protein, 9 aa, Artificial Sequence
  Synthetic
RLFARTRSM

SEQ ID NO: 3079 - protein, 9 aa, Artificial Sequence
  Synthetic
SFNPETNIL

SEQ ID NO: 3080 - protein, 9 aa, Artificial Sequence
  Synthetic
SELVIGAVI

SEQ ID NO: 3081 - protein, 10 aa, Artificial Sequence
  Synthetic
ELVIGAVILR

SEQ ID NO: 3082 - protein, 9 aa, Artificial Sequence
  Synthetic
LVIGAVILR

SEQ ID NO: 3083 - protein, 9 aa, Artificial Sequence
  Synthetic
HLRIAGHHL

SEQ ID NO: 3084 - protein, 9 aa, Artificial Sequence
  Synthetic
RIAGHHLGR

SEQ ID NO: 3085 - protein, 9 aa, Artificial Sequence
  Synthetic
LPKEITVAT

SEQ ID NO: 3086 - protein, 10 aa, Artificial Sequence
  Synthetic
TVATSRTLSY

SEQ ID NO: 3087 - protein, 9 aa, Artificial Sequence
  Synthetic
VATSRTLSY

SEQ ID NO: 3088 - protein, 10 aa, Artificial Sequence
  Synthetic
VATSRTLSYY

SEQ ID NO: 3089 - protein, 10 aa, Artificial Sequence
  Synthetic
SQRVAGDSGF

SEQ ID NO: 3090 - protein, 9 aa, Artificial Sequence
  Synthetic
AGDSGFAAY

SEQ ID NO: 3091 - protein, 9 aa, Artificial Sequence
  Synthetic
DSGFAAYSR

SEQ ID NO: 3092 - protein, 10 aa, Artificial Sequence
  Synthetic
YSRYRIGNYK

SEQ ID NO: 3093 - protein, 9 aa, Artificial Sequence
  Synthetic
SSSDNIALL

SEQ ID NO: 3094 - protein, 10 aa, Artificial Sequence
  Synthetic
RPQGLPNNTA

SEQ ID NO: 3095 - protein, 10 aa, Artificial Sequence
  Synthetic
QGLPNNTASW

SEQ ID NO: 3096 - protein, 9 aa, Artificial Sequence
  Synthetic
LPNNTASWF

SEQ ID NO: 3097 - protein, 9 aa, Artificial Sequence
  Synthetic
SPDDQIGYY

SEQ ID NO: 3098 - protein, 9 aa, Artificial Sequence
  Synthetic
MKDLSPRWY

SEQ ID NO: 3099 - protein, 10 aa, Artificial Sequence
  Synthetic
YLGTGPEAGL

SEQ ID NO: 3100 - protein, 9 aa, Artificial Sequence
  Synthetic
AGLPYGANK

SEQ ID NO: 3101 - protein, 10 aa, Artificial Sequence
  Synthetic
LPYGANKDGI

SEQ ID NO: 3102 - protein, 10 aa, Artificial Sequence
  Synthetic
YGANKDGIIW

SEQ ID NO: 3103 - protein, 9 aa, Artificial Sequence
  Synthetic
IIWVATEGA

SEQ ID NO: 3104 - protein, 9 aa, Artificial Sequence
  Synthetic
GTRNPANNA

SEQ ID NO: 3105 - protein, 10 aa, Artificial Sequence
  Synthetic
AEGSRGGSQA

SEQ ID NO: 3106 - protein, 10 aa, Artificial Sequence
  Synthetic
SQASSRSSSR

SEQ ID NO: 3107 - protein, 9 aa, Artificial Sequence
  Synthetic
SSRGTSPAR

SEQ ID NO: 3108 - protein, 9 aa, Artificial Sequence
  Synthetic
KSAAEASKK

SEQ ID NO: 3109 - protein, 9 aa, Artificial Sequence
  Synthetic
RTATKAYNV

SEQ ID NO: 3110 - protein, 10 aa, Artificial Sequence
  Synthetic
QELIRQGTDY

SEQ ID NO: 3111 - protein, 9 aa, Artificial Sequence
  Synthetic
ELIRQGTDY

SEQ ID NO: 3112 - protein, 10 aa, Artificial Sequence
  Synthetic
QFAPSASAFF

SEQ ID NO: 3113 - protein, 9 aa, Artificial Sequence
  Synthetic
FAPSASAFF

SEQ ID NO: 3114 - protein, 10 aa, Artificial Sequence
  Synthetic
APSASAFFGM

SEQ ID NO: 3115 - protein, 10 aa, Artificial Sequence
  Synthetic
SASAFFGMSR

SEQ ID NO: 3116 - protein, 10 aa, Artificial Sequence
  Synthetic
VTPSGTWLTY

SEQ ID NO: 3117 - protein, 9 aa, Artificial Sequence
  Synthetic
TPSGTWLTY

SEQ ID NO: 3118 - protein, 9 aa, Artificial Sequence
  Synthetic
KLDDKDPNF

SEQ ID NO: 3119 - protein, 9 aa, Artificial Sequence
  Synthetic
LLNKHIDAY

SEQ ID NO: 3120 - protein, 10 aa, Artificial Sequence
  Synthetic
YKTFPPTEPK

SEQ ID NO: 3121 - protein, 9 aa, Artificial Sequence
  Synthetic
KKQQTVTLL

SEQ ID NO: 3122 - protein, 9 aa, Artificial Sequence
  Synthetic
HLKDGTCGL

SEQ ID NO: 3123 - protein, 10 aa, Artificial Sequence
  Synthetic
APHGHVMVEL

SEQ ID NO: 3124 - protein, 9 aa, Artificial Sequence
  Synthetic
VMVELVAEL

SEQ ID NO: 3125 - protein, 9 aa, Artificial Sequence
  Synthetic
VPHVGEIPV

SEQ ID NO: 3126 - protein, 9 aa, Artificial Sequence
  Synthetic
HVGEIPVAY

SEQ ID NO: 3127 - protein, 10 aa, Artificial Sequence
  Synthetic
IPVAYRKVLL

SEQ ID NO: 3128 - protein, 10 aa, Artificial Sequence
  Synthetic
VPANSTVLSF

SEQ ID NO: 3129 - protein, 9 aa, Artificial Sequence
  Synthetic
YLASGGQPI

SEQ ID NO: 3130 - protein, 9 aa, Artificial Sequence
  Synthetic
VVYRAFDIY

SEQ ID NO: 3131 - protein, 9 aa, Artificial Sequence
  Synthetic
KVAGFAKFL

SEQ ID NO: 3132 - protein, 10 aa, Artificial Sequence
  Synthetic
KVAGFAKFLK

SEQ ID NO: 3133 - protein, 9 aa, Artificial Sequence
  Synthetic
NLIDSYFVV

SEQ ID NO: 3134 - protein, 9 aa, Artificial Sequence
  Synthetic
YFVVKRHTF

SEQ ID NO: 3135 - protein, 9 aa, Artificial Sequence
  Synthetic
VPHISRQRL

SEQ ID NO: 3136 - protein, 9 aa, Artificial Sequence
  Synthetic
TLKEILVTY

SEQ ID NO: 3137 - protein, 10 aa, Artificial Sequence
  Synthetic
FVENPDILRV

SEQ ID NO: 3138 - protein, 9 aa, Artificial Sequence
  Synthetic
VENPDILRV

SEQ ID NO: 3139 - protein, 10 aa, Artificial Sequence
  Synthetic
VENPDILRVY

SEQ ID NO: 3140 - protein, 9 aa, Artificial Sequence
  Synthetic
VRQALLKTV

SEQ ID NO: 3141 - protein, 9 aa, Artificial Sequence
  Synthetic
DAMRNAGIV

SEQ ID NO: 3142 - protein, 9 aa, Artificial Sequence
  Synthetic
SLLMPILTL

SEQ ID NO: 3143 - protein, 10 aa, Artificial Sequence
  Synthetic
HVDTDLTKPY

SEQ ID NO: 3144 - protein, 9 aa, Artificial Sequence
  Synthetic
KPYIKWDLL

SEQ ID NO: 3145 - protein, 10 aa, Artificial Sequence
  Synthetic
RYFKYWDQTY

SEQ ID NO: 3146 - protein, 9 aa, Artificial Sequence
  Synthetic
ILHCANFNV

SEQ ID NO: 3147 - protein, 9 aa, Artificial Sequence
  Synthetic
STVFPPTSF

SEQ ID NO: 3148 - protein, 9 aa, Artificial Sequence
  Synthetic
FPPTSFGPL

SEQ ID NO: 3149 - protein, 9 aa, Artificial Sequence
  Synthetic
TSFGPLVRK

SEQ ID NO: 3150 - protein, 9 aa, Artificial Sequence
  Synthetic
SFGPLVRKI

SEQ ID NO: 3151 - protein, 10 aa, Artificial Sequence
  Synthetic
KIFVDGVPFV

SEQ ID NO: 3152 - protein, 10 aa, Artificial Sequence
  Synthetic
FVVSTGYHFR

SEQ ID NO: 3153 - protein, 9 aa, Artificial Sequence
  Synthetic
VVSTGYHFR

SEQ ID NO: 3154 - protein, 9 aa, Artificial Sequence
  Synthetic
NLHSSRLSF

SEQ ID NO: 3155 - protein, 10 aa, Artificial Sequence
  Synthetic
QTVKPGNFNK

SEQ ID NO: 3156 - protein, 9 aa, Artificial Sequence
  Synthetic
FAVSKGFFK

SEQ ID NO: 3157 - protein, 9 aa, Artificial Sequence
  Synthetic
AAISDYDYY

SEQ ID NO: 3158 - protein, 10 aa, Artificial Sequence
  Synthetic
AAISDYDYYR

SEQ ID NO: 3159 - protein, 9 aa, Artificial Sequence
  Synthetic
AISDYDYYR

SEQ ID NO: 3160 - protein, 9 aa, Artificial Sequence
  Synthetic
YRYNLPTMC

SEQ ID NO: 3161 - protein, 9 aa, Artificial Sequence
  Synthetic
FVVEVVDKY

SEQ ID NO: 3162 - protein, 9 aa, Artificial Sequence
  Synthetic
KSAGFPFNK

SEQ ID NO: 3163 - protein, 10 aa, Artificial Sequence
  Synthetic
KSAGFPFNKW

SEQ ID NO: 3164 - protein, 10 aa, Artificial Sequence
  Synthetic
ARLYYDSMSY

SEQ ID NO: 3165 - protein, 9 aa, Artificial Sequence
  Synthetic
FAYTKRNVI

SEQ ID NO: 3166 - protein, 9 aa, Artificial Sequence
  Synthetic
NVIPTITQM

SEQ ID NO: 3167 - protein, 9 aa, Artificial Sequence
  Synthetic
IPTITQMNL

SEQ ID NO: 3168 - protein, 9 aa, Artificial Sequence
  Synthetic
TITQMNLKY

SEQ ID NO: 3169 - protein, 10 aa, Artificial Sequence
  Synthetic
YAISAKNRAR

SEQ ID NO: 3170 - protein, 9 aa, Artificial Sequence
  Synthetic
SAKNRARTV

SEQ ID NO: 3171 - protein, 9 aa, Artificial Sequence
  Synthetic
SICSTMTNR

SEQ ID NO: 3172 - protein, 9 aa, Artificial Sequence
  Synthetic
IAATRGATV

SEQ ID NO: 3173 - protein, 9 aa, Artificial Sequence
  Synthetic
ATVVIGTSK

SEQ ID NO: 3174 - protein, 10 aa, Artificial Sequence
  Synthetic
VENPHLMGWD

SEQ ID NO: 3175 - protein, 9 aa, Artificial Sequence
  Synthetic
NMLRIMASL

SEQ ID NO: 3176 - protein, 9 aa, Artificial Sequence
  Synthetic
LRIMASLVL

SEQ ID NO: 3177 - protein, 9 aa, Artificial Sequence
  Synthetic
IMASLVLAR

SEQ ID NO: 3178 - protein, 9 aa, Artificial Sequence
  Synthetic
MASLVLARK

SEQ ID NO: 3179 - protein, 9 aa, Artificial Sequence
  Synthetic
RLANECAQV

SEQ ID NO: 3180 - protein, 10 aa, Artificial Sequence
  Synthetic
TSSGDATTAY

SEQ ID NO: 3181 - protein, 9 aa, Artificial Sequence
  Synthetic
VRNLQHRLY

SEQ ID NO: 3182 - protein, 9 aa, Artificial Sequence
  Synthetic
FVNEFYAYL

SEQ ID NO: 3183 - protein, 10 aa, Artificial Sequence
  Synthetic
FVNEFYAYLR

SEQ ID NO: 3184 - protein, 9 aa, Artificial Sequence
  Synthetic
LRKHFSMMI

SEQ ID NO: 3185 - protein, 9 aa, Artificial Sequence
  Synthetic
LYYQNNVFM

SEQ ID NO: 3186 - protein, 10 aa, Artificial Sequence
  Synthetic
LVKQGDDYVY

SEQ ID NO: 3187 - protein, 9 aa, Artificial Sequence
  Synthetic
KQGDDYVYL

SEQ ID NO: 3188 - protein, 10 aa, Artificial Sequence
  Synthetic
YLPYPDPSRI

SEQ ID NO: 3189 - protein, 10 aa, Artificial Sequence
  Synthetic
LPYPDPSRIL

SEQ ID NO: 3190 - protein, 10 aa, Artificial Sequence
  Synthetic
QEYADVFHLY

SEQ ID NO: 3191 - protein, 9 aa, Artificial Sequence
  Synthetic
YADVFHLYL

SEQ ID NO: 3192 - protein, 10 aa, Artificial Sequence
  Synthetic
LTNDNTSRYW

SEQ ID NO: 3193 - protein, 9 aa, Artificial Sequence
  Synthetic
WEPEFYEAM

SEQ ID NO: 3194 - protein, 9 aa, Artificial Sequence
  Synthetic
AMYTPHTVL

SEQ ID NO: 3195 - protein, 9 aa, Artificial Sequence
  Synthetic
TPHTVLQAV

SEQ ID NO: 3196 - protein, 10 aa, Artificial Sequence
  Synthetic
QLYLGGMSYY

SEQ ID NO: 3197 - protein, 9 aa, Artificial Sequence
  Synthetic
YRGTTTYKL

SEQ ID NO: 3198 - protein, 9 aa, Artificial Sequence
  Synthetic
TLVPQEHYV

SEQ ID NO: 3199 - protein, 9 aa, Artificial Sequence
  Synthetic
VPQEHYVRI

SEQ ID NO: 3200 - protein, 9 aa, Artificial Sequence
  Synthetic
YQKVGMQKY

SEQ ID NO: 3201 - protein, 9 aa, Artificial Sequence
  Synthetic
FAIGLALYY

SEQ ID NO: 3202 - protein, 9 aa, Artificial Sequence
  Synthetic
YYPSARIVY

SEQ ID NO: 3203 - protein, 9 aa, Artificial Sequence
  Synthetic
IPARARVEC

SEQ ID NO: 3204 - protein, 10 aa, Artificial Sequence
  Synthetic
IPARARVECF

SEQ ID NO: 3205 - protein, 9 aa, Artificial Sequence
  Synthetic
YVFCTVNAL

SEQ ID NO: 3206 - protein, 9 aa, Artificial Sequence
  Synthetic
VVNARLRAK

SEQ ID NO: 3207 - protein, 10 aa, Artificial Sequence
  Synthetic
RPQIGVVREF

SEQ ID NO: 3208 - protein, 9 aa, Artificial Sequence
  Synthetic
AVASKILGL

SEQ ID NO: 3209 - protein, 9 aa, Artificial Sequence
  Synthetic
ILGLPTQTV

SEQ ID NO: 3210 - protein, 10 aa, Artificial Sequence
  Synthetic
EEAIRHVRAW

SEQ ID NO: 3211 - protein, 9 aa, Artificial Sequence
  Synthetic
LQLGFSTGV

SEQ ID NO: 3212 - protein, 9 aa, Artificial Sequence
  Synthetic
MYKGLPWNV

SEQ ID NO: 3213 - protein, 10 aa, Artificial Sequence
  Synthetic
KNLSDRVVFV

SEQ ID NO: 3214 - protein, 9 aa, Artificial Sequence
  Synthetic
PFMIDVQQW

SEQ ID NO: 3215 - protein, 9 aa, Artificial Sequence
  Synthetic
LLADKFPVL

SEQ ID NO: 3216 - protein, 10 aa, Artificial Sequence
  Synthetic
YKIEELFYSY

SEQ ID NO: 3217 - protein, 9 aa, Artificial Sequence
  Synthetic
KIEELFYSY

SEQ ID NO: 3218 - protein, 9 aa, Artificial Sequence
  Synthetic
FTDGVCLFW

SEQ ID NO: 3219 - protein, 9 aa, Artificial Sequence
  Synthetic
SLYVNKHAF

SEQ ID NO: 3220 - protein, 9 aa, Artificial Sequence
  Synthetic
AGFSLWVYK

SEQ ID NO: 3221 - protein, 10 aa, Artificial Sequence
  Synthetic
YNLWNTFTRL

SEQ ID NO: 3222 - protein, 9 aa, Artificial Sequence
  Synthetic
NTFTRLQSL

SEQ ID NO: 3223 - protein, 9 aa, Artificial Sequence
  Synthetic
SLENVAFNV

SEQ ID NO: 3224 - protein, 9 aa, Artificial Sequence
  Synthetic
TTLPVNVAF

SEQ ID NO: 3225 - protein, 9 aa, Artificial Sequence
  Synthetic
TICAPLTVF

SEQ ID NO: 3226 - protein, 9 aa, Artificial Sequence
  Synthetic
GRVDGQVDL

SEQ ID NO: 3227 - protein, 9 aa, Artificial Sequence
  Synthetic
KVDGVVQQL

SEQ ID NO: 3228 - protein, 9 aa, Artificial Sequence
  Synthetic
VVQQLPETY

SEQ ID NO: 3229 - protein, 10 aa, Artificial Sequence
  Synthetic
KPRSQMEIDF

SEQ ID NO: 3230 - protein, 10 aa, Artificial Sequence
  Synthetic
FIERYKLEGY

SEQ ID NO: 3231 - protein, 9 aa, Artificial Sequence
  Synthetic
LLLDDFVEI

SEQ ID NO: 3232 - protein, 9 aa, Artificial Sequence
  Synthetic
SVVSKVVKV

SEQ ID NO: 3233 - protein, 9 aa, Artificial Sequence
  Synthetic
VAMPNLYKM

SEQ ID NO: 3234 - protein, 9 aa, Artificial Sequence
  Synthetic
LPKGIMMNV

SEQ ID NO: 3235 - protein, 10 aa, Artificial Sequence
  Synthetic
CATVHTANKW

SEQ ID NO: 3236 - protein, 9 aa, Artificial Sequence
  Synthetic
KLMGHFAWW

SEQ ID NO: 3237 - protein, 9 aa, Artificial Sequence
  Synthetic
YVMHANYIF

SEQ ID NO: 3238 - protein, 10 aa, Artificial Sequence
  Synthetic
FWRNTNPIQL

SEQ ID NO: 3239 - protein, 9 aa, Artificial Sequence
  Synthetic
WRNTNPIQL

SEQ ID NO: 3240 - protein, 10 aa, Artificial Sequence
  Synthetic
NPIQLSSYSL

SEQ ID NO: 3241 - protein, 10 aa, Artificial Sequence
  Synthetic
SYSLFDMSKF

SEQ ID NO: 3242 - protein, 9 aa, Artificial Sequence
  Synthetic
FPLKLRGTA

SEQ ID NO: 3243 - protein, 10 aa, Artificial Sequence
  Synthetic
FPLKLRGTAV

SEQ ID NO: 3244 - protein, 9 aa, Artificial Sequence
  Synthetic
LRGTAVMSL

SEQ ID NO: 3245 - protein, 9 aa, Artificial Sequence
  Synthetic
TFNGECPNF

SEQ ID NO: 3246 - protein, 9 aa, Artificial Sequence
  Synthetic
GFMGRIRSV

SEQ ID NO: 3247 - protein, 10 aa, Artificial Sequence
  Synthetic
EEIAIILASF

SEQ ID NO: 3248 - protein, 9 aa, Artificial Sequence
  Synthetic
ILSPLYAFA

SEQ ID NO: 3249 - protein, 9 aa, Artificial Sequence
  Synthetic
VRSIFSRTL

SEQ ID NO: 3250 - protein, 10 aa, Artificial Sequence
  Synthetic
ITILDGISQY

SEQ ID NO: 3251 - protein, 9 aa, Artificial Sequence
  Synthetic
RLIDAMMFT

SEQ ID NO: 3252 - protein, 9 aa, Artificial Sequence
  Synthetic
TVYEKLKPV

SEQ ID NO: 3253 - protein, 9 aa, Artificial Sequence
  Synthetic
EIKESVQTF

SEQ ID NO: 3254 - protein, 9 aa, Artificial Sequence
  Synthetic
GETLPTEVL

SEQ ID NO: 3255 - protein, 10 aa, Artificial Sequence
  Synthetic
DTVIEVQGYK

SEQ ID NO: 3256 - protein, 10 aa, Artificial Sequence
  Synthetic
QGYKSVNITF

SEQ ID NO: 3257 - protein, 10 aa, Artificial Sequence
  Synthetic
FELDERIDKV

SEQ ID NO: 3258 - protein, 9 aa, Artificial Sequence
  Synthetic
ELDERIDKV

SEQ ID NO: 3259 - protein, 9 aa, Artificial Sequence
  Synthetic
VLNEKCSAY

SEQ ID NO: 3260 - protein, 10 aa, Artificial Sequence
  Synthetic
VELGTEVNEF

SEQ ID NO: 3261 - protein, 9 aa, Artificial Sequence
  Synthetic
SELLTPLGI

SEQ ID NO: 3262 - protein, 9 aa, Artificial Sequence
  Synthetic
YLFDESGEF

SEQ ID NO: 3263 - protein, 9 aa, Artificial Sequence
  Synthetic
FEPSTQYEY

SEQ ID NO: 3264 - protein, 10 aa, Artificial Sequence
  Synthetic
DDYQGKPLEF

SEQ ID NO: 3265 - protein, 10 aa, Artificial Sequence
  Synthetic
LEFGATSAAL

SEQ ID NO: 3266 - protein, 9 aa, Artificial Sequence
  Synthetic
VEVQPQLEM

SEQ ID NO: 3267 - protein, 9 aa, Artificial Sequence
  Synthetic
LEMELTPVV

SEQ ID NO: 3268 - protein, 10 aa, Artificial Sequence
  Synthetic
MELTPVVQTI

SEQ ID NO: 3269 - protein, 9 aa, Artificial Sequence
  Synthetic
TPVVQTIEV

SEQ ID NO: 3270 - protein, 10 aa, Artificial Sequence
  Synthetic
TIEVNSFSGY

SEQ ID NO: 3271 - protein, 9 aa, Artificial Sequence
  Synthetic
IEVNSFSGY

SEQ ID NO: 3272 - protein, 9 aa, Artificial Sequence
  Synthetic
NSFSGYLKL

SEQ ID NO: 3273 - protein, 9 aa, Artificial Sequence
  Synthetic
YLKLTDNVY

SEQ ID NO: 3274 - protein, 9 aa, Artificial Sequence
  Synthetic
EAKKVKPTV

SEQ ID NO: 3275 - protein, 9 aa, Artificial Sequence
  Synthetic
VVVNAANVY

SEQ ID NO: 3276 - protein, 9 aa, Artificial Sequence
  Synthetic
YIATNGPLK

SEQ ID NO: 3277 - protein, 9 aa, Artificial Sequence
  Synthetic
YENFNQHEV

SEQ ID NO: 3278 - protein, 9 aa, Artificial Sequence
  Synthetic
LLSAGIFGA

SEQ ID NO: 3279 - protein, 9 aa, Artificial Sequence
  Synthetic
GADPIHSLR

SEQ ID NO: 3280 - protein, 9 aa, Artificial Sequence
  Synthetic
RTNVYLAVF

SEQ ID NO: 3281 - protein, 10 aa, Artificial Sequence
  Synthetic
AVFDKNLYDK

SEQ ID NO: 3282 - protein, 9 aa, Artificial Sequence
  Synthetic
LYDKLVSSF

SEQ ID NO: 3283 - protein, 9 aa, Artificial Sequence
  Synthetic
KLVSSFLEM

SEQ ID NO: 3284 - protein, 10 aa, Artificial Sequence
  Synthetic
KIAEIPKEEV

SEQ ID NO: 3285 - protein, 10 aa, Artificial Sequence
  Synthetic
EVKPFITESK

SEQ ID NO: 3286 - protein, 9 aa, Artificial Sequence
  Synthetic
ESKPSVEQR

SEQ ID NO: 3287 - protein, 10 aa, Artificial Sequence
  Synthetic
FLTENLLLYI

SEQ ID NO: 3288 - protein, 9 aa, Artificial Sequence
  Synthetic
LVSDIDITF

SEQ ID NO: 3289 - protein, 9 aa, Artificial Sequence
  Synthetic
APYIVGDVV

SEQ ID NO: 3290 - protein, 9 aa, Artificial Sequence
  Synthetic
LTAVVIPTK

SEQ ID NO: 3291 - protein, 10 aa, Artificial Sequence
  Synthetic
ALRKVPTDNY

SEQ ID NO: 3292 - protein, 10 aa, Artificial Sequence
  Synthetic
KQEILGTVSW

SEQ ID NO: 3293 - protein, 9 aa, Artificial Sequence
  Synthetic
MLAHAEETR

SEQ ID NO: 3294 - protein, 9 aa, Artificial Sequence
  Synthetic
AHAEETRKL

SEQ ID NO: 3295 - protein, 9 aa, Artificial Sequence
  Synthetic
KLMPVCVET

SEQ ID NO: 3296 - protein, 9 aa, Artificial Sequence
  Synthetic
AIVSTIQRK

SEQ ID NO: 3297 - protein, 9 aa, Artificial Sequence
  Synthetic
VVDYGARFY

SEQ ID NO: 3298 - protein, 9 aa, Artificial Sequence
  Synthetic
SLINTLNDL

SEQ ID NO: 3299 - protein, 10 aa, Artificial Sequence
  Synthetic
VSSPDAVTAY

SEQ ID NO: 3300 - protein, 9 aa, Artificial Sequence
  Synthetic
TISLAGSYK

SEQ ID NO: 3301 - protein, 10 aa, Artificial Sequence
  Synthetic
ISLAGSYKDW

SEQ ID NO: 3302 - protein, 9 aa, Artificial Sequence
  Synthetic
YYTSNPTTF

SEQ ID NO: 3303 - protein, 9 aa, Artificial Sequence
  Synthetic
TSNPTTFHL

SEQ ID NO: 3304 - protein, 9 aa, Artificial Sequence
  Synthetic
HLDGEVITF

SEQ ID NO: 3305 - protein, 9 aa, Artificial Sequence
  Synthetic
GEVITFDNL

SEQ ID NO: 3306 - protein, 9 aa, Artificial Sequence
  Synthetic
ITFDNLKTL

SEQ ID NO: 3307 - protein, 9 aa, Artificial Sequence
  Synthetic
RTIKVFTTV

SEQ ID NO: 3308 - protein, 9 aa, Artificial Sequence
  Synthetic
NINLHTQVV

SEQ ID NO: 3309 - protein, 9 aa, Artificial Sequence
  Synthetic
QVVDMSMTY

SEQ ID NO: 3310 - protein, 9 aa, Artificial Sequence
  Synthetic
MSMTYGQQF

SEQ ID NO: 3311 - protein, 9 aa, Artificial Sequence
  Synthetic
LRVEAFEYY

SEQ ID NO: 3312 - protein, 10 aa, Artificial Sequence
  Synthetic
HTTDPSFLGR

SEQ ID NO: 3313 - protein, 9 aa, Artificial Sequence
  Synthetic
FLGRYMSAL

SEQ ID NO: 3314 - protein, 9 aa, Artificial Sequence
  Synthetic
YMSALNHTK

SEQ ID NO: 3315 - protein, 9 aa, Artificial Sequence
  Synthetic
MSALNHTKK

SEQ ID NO: 3316 - protein, 10 aa, Artificial Sequence
  Synthetic
MSALNHTKKW

SEQ ID NO: 3317 - protein, 9 aa, Artificial Sequence
  Synthetic
SALNHTKKW

SEQ ID NO: 3318 - protein, 9 aa, Artificial Sequence
  Synthetic
WKYPQVNGL

SEQ ID NO: 3319 - protein, 10 aa, Artificial Sequence
  Synthetic
YPQVNGLTSI

SEQ ID NO: 3320 - protein, 9 aa, Artificial Sequence
  Synthetic
ARAGEAANF

SEQ ID NO: 3321 - protein, 9 aa, Artificial Sequence
  Synthetic
GEAANFCAL

SEQ ID NO: 3322 - protein, 10 aa, Artificial Sequence
  Synthetic
LGDVRETMSY

SEQ ID NO: 3323 - protein, 9 aa, Artificial Sequence
  Synthetic
VRETMSYLF

SEQ ID NO: 3324 - protein, 9 aa, Artificial Sequence
  Synthetic
VMYMGTLSY

SEQ ID NO: 3325 - protein, 10 aa, Artificial Sequence
  Synthetic
YTGNYQCGHY

SEQ ID NO: 3326 - protein, 9 aa, Artificial Sequence
  Synthetic
DVFYKENSY

SEQ ID NO: 3327 - protein, 10 aa, Artificial Sequence
  Synthetic
YTTTIKPVTY

SEQ ID NO: 3328 - protein, 9 aa, Artificial Sequence
  Synthetic
EIDPKLDNY

SEQ ID NO: 3329 - protein, 9 aa, Artificial Sequence
  Synthetic
NYYKKDNSY

SEQ ID NO: 3330 - protein, 9 aa, Artificial Sequence
  Synthetic
YYKKDNSYF

SEQ ID NO: 3331 - protein, 9 aa, Artificial Sequence
  Synthetic
ASFDNFKFV

SEQ ID NO: 3332 - protein, 9 aa, Artificial Sequence
  Synthetic
KFADDLNQL

SEQ ID NO: 3333 - protein, 9 aa, Artificial Sequence
  Synthetic
ASRELKVTF

SEQ ID NO: 3334 - protein, 10 aa, Artificial Sequence
  Synthetic
DVVAIDYKHY

SEQ ID NO: 3335 - protein, 9 aa, Artificial Sequence
  Synthetic
VVAIDYKHY

SEQ ID NO: 3336 - protein, 9 aa, Artificial Sequence
  Synthetic
DYKHYTPSF

SEQ ID NO: 3337 - protein, 9 aa, Artificial Sequence
  Synthetic
LHKPIVWHV

SEQ ID NO: 3338 - protein, 10 aa, Artificial Sequence
  Synthetic
NKATYKPNTW

SEQ ID NO: 3339 - protein, 10 aa, Artificial Sequence
  Synthetic
SEDAQGMDNL

SEQ ID NO: 3340 - protein, 9 aa, Artificial Sequence
  Synthetic
EEVVENPTI

SEQ ID NO: 3341 - protein, 9 aa, Artificial Sequence
  Synthetic
TEVVGDIIL

SEQ ID NO: 3342 - protein, 10 aa, Artificial Sequence
  Synthetic
AYVDNSSLTI

SEQ ID NO: 3343 - protein, 9 aa, Artificial Sequence
  Synthetic
LTIKKPNEL

SEQ ID NO: 3344 - protein, 9 aa, Artificial Sequence
  Synthetic
KPNELSRVL

SEQ ID NO: 3345 - protein, 9 aa, Artificial Sequence
  Synthetic
NELSRVLGL

SEQ ID NO: 3346 - protein, 9 aa, Artificial Sequence
  Synthetic
SRVLGLKTL

SEQ ID NO: 3347 - protein, 10 aa, Artificial Sequence
  Synthetic
SVPWDTIANY

SEQ ID NO: 3348 - protein, 10 aa, Artificial Sequence
  Synthetic
DTIANYAKPF

SEQ ID NO: 3349 - protein, 9 aa, Artificial Sequence
  Synthetic
YAKPFLNKV

SEQ ID NO: 3350 - protein, 9 aa, Artificial Sequence
  Synthetic
RIKASMPTT

SEQ ID NO: 3351 - protein, 9 aa, Artificial Sequence
  Synthetic
KASMPTTIA

SEQ ID NO: 3352 - protein, 10 aa, Artificial Sequence
  Synthetic
MPTTIAKNTV

SEQ ID NO: 3353 - protein, 9 aa, Artificial Sequence
  Synthetic
TTIAKNTVK

SEQ ID NO: 3354 - protein, 9 aa, Artificial Sequence
  Synthetic
NTVKSVGKF

SEQ ID NO: 3355 - protein, 10 aa, Artificial Sequence
  Synthetic
KFCLEASFNY

SEQ ID NO: 3356 - protein, 9 aa, Artificial Sequence
  Synthetic
CLEASFNYL

SEQ ID NO: 3357 - protein, 9 aa, Artificial Sequence
  Synthetic
KLINIIIWF

SEQ ID NO: 3358 - protein, 9 aa, Artificial Sequence
  Synthetic
SLIYSTAAL

SEQ ID NO: 3359 - protein, 9 aa, Artificial Sequence
  Synthetic
STAALGVLM

SEQ ID NO: 3360 - protein, 9 aa, Artificial Sequence
  Synthetic
MSNLGMPSY

SEQ ID NO: 3361 - protein, 9 aa, Artificial Sequence
  Synthetic
EGYLNSTNV

SEQ ID NO: 3362 - protein, 10 aa, Artificial Sequence
  Synthetic
NSTNVTIATY

SEQ ID NO: 3363 - protein, 9 aa, Artificial Sequence
  Synthetic
STNVTIATY

SEQ ID NO: 3364 - protein, 10 aa, Artificial Sequence
  Synthetic
ETIQITISSF

SEQ ID NO: 3365 - protein, 9 aa, Artificial Sequence
  Synthetic
IQITISSFK

SEQ ID NO: 3366 - protein, 10 aa, Artificial Sequence
  Synthetic
LTAFGLVAEW

SEQ ID NO: 3367 - protein, 9 aa, Artificial Sequence
  Synthetic
LVAEWFLAY

SEQ ID NO: 3368 - protein, 9 aa, Artificial Sequence
  Synthetic
AEWFLAYIL

SEQ ID NO: 3369 - protein, 10 aa, Artificial Sequence
  Synthetic
AEWFLAYILF

SEQ ID NO: 3370 - protein, 9 aa, Artificial Sequence
  Synthetic
AYILFTRFF

SEQ ID NO: 3371 - protein, 9 aa, Artificial Sequence
  Synthetic
AVHFISNSW

SEQ ID NO: 3372 - protein, 10 aa, Artificial Sequence
  Synthetic
HFISNSWLMW

SEQ ID NO: 3373 - protein, 9 aa, Artificial Sequence
  Synthetic
WLMWLIINL

SEQ ID NO: 3374 - protein, 10 aa, Artificial Sequence
  Synthetic
LVQMAPISAM

SEQ ID NO: 3375 - protein, 9 aa, Artificial Sequence
  Synthetic
SAMVRMYIF

SEQ ID NO: 3376 - protein, 10 aa, Artificial Sequence
  Synthetic
RMYIFFASFY

SEQ ID NO: 3377 - protein, 9 aa, Artificial Sequence
  Synthetic
SFYYVWKSY

SEQ ID NO: 3378 - protein, 9 aa, Artificial Sequence
  Synthetic
FYYVWKSYV

SEQ ID NO: 3379 - protein, 10 aa, Artificial Sequence
  Synthetic
YVYANGGKGF

SEQ ID NO: 3380 - protein, 9 aa, Artificial Sequence
  Synthetic
DTFCAGSTF

SEQ ID NO: 3381 - protein, 10 aa, Artificial Sequence
  Synthetic
EVARDLSLQF

SEQ ID NO: 3382 - protein, 9 aa, Artificial Sequence
  Synthetic
VARDLSLQF

SEQ ID NO: 3383 - protein, 10 aa, Artificial Sequence
  Synthetic
TVKNGSIHLY

SEQ ID NO: 3384 - protein, 9 aa, Artificial Sequence
  Synthetic
VKNGSIHLY

SEQ ID NO: 3385 - protein, 10 aa, Artificial Sequence
  Synthetic
YFDKAGQKTY

SEQ ID NO: 3386 - protein, 10 aa, Artificial Sequence
  Synthetic
TYERHSLSHF

SEQ ID NO: 3387 - protein, 9 aa, Artificial Sequence
  Synthetic
YERHSLSHF

SEQ ID NO: 3388 - protein, 9 aa, Artificial Sequence
  Synthetic
ERHSLSHFV

SEQ ID NO: 3389 - protein, 9 aa, Artificial Sequence
  Synthetic
SSAKSASVY

SEQ ID NO: 3390 - protein, 9 aa, Artificial Sequence
  Synthetic
SAKSASVYY

SEQ ID NO: 3391 - protein, 9 aa, Artificial Sequence
  Synthetic
DSAEVAVKM

SEQ ID NO: 3392 - protein, 10 aa, Artificial Sequence
  Synthetic
EVAVKMFDAY

SEQ ID NO: 3393 - protein, 10 aa, Artificial Sequence
  Synthetic
KMFDAYVNTF

SEQ ID NO: 3394 - protein, 9 aa, Artificial Sequence
  Synthetic
MFDAYVNTF

SEQ ID NO: 3395 - protein, 10 aa, Artificial Sequence
  Synthetic
AYVNTFSSTF

SEQ ID NO: 3396 - protein, 9 aa, Artificial Sequence
  Synthetic
YVNTFSSTF

SEQ ID NO: 3397 - protein, 9 aa, Artificial Sequence
  Synthetic
VPMEKLKTL

SEQ ID NO: 3398 - protein, 9 aa, Artificial Sequence
  Synthetic
AEAELAKNV

SEQ ID NO: 3399 - protein, 9 aa, Artificial Sequence
  Synthetic
AELAKNVSL

SEQ ID NO: 3400 - protein, 9 aa, Artificial Sequence
  Synthetic
SLDNVLSTF

SEQ ID NO: 3401 - protein, 10 aa, Artificial Sequence
  Synthetic
TFISAARQGF

SEQ ID NO: 3402 - protein, 10 aa, Artificial Sequence
  Synthetic
DSCNNYMLTY

SEQ ID NO: 3403 - protein, 9 aa, Artificial Sequence
  Synthetic
VENMTPRDL

SEQ ID NO: 3404 - protein, 9 aa, Artificial Sequence
  Synthetic
TPRDLGACI

SEQ ID NO: 3405 - protein, 9 aa, Artificial Sequence
  Synthetic
VAKSHNIAL

SEQ ID NO: 3406 - protein, 10 aa, Artificial Sequence
  Synthetic
AKSHNIALIW

SEQ ID NO: 3407 - protein, 9 aa, Artificial Sequence
  Synthetic
QVVNVVTTK

SEQ ID NO: 3408 - protein, 9 aa, Artificial Sequence
  Synthetic
VVTTKIALK

SEQ ID NO: 3409 - protein, 10 aa, Artificial Sequence
  Synthetic
KQLIKVTLVF

SEQ ID NO: 3410 - protein, 9 aa, Artificial Sequence
  Synthetic
FYLITPVHV

SEQ ID NO: 3411 - protein, 9 aa, Artificial Sequence
  Synthetic
YLITPVHVM

SEQ ID NO: 3412 - protein, 9 aa, Artificial Sequence
  Synthetic
SEIIGYKAI

SEQ ID NO: 3413 - protein, 9 aa, Artificial Sequence
  Synthetic
IAAVITREV

SEQ ID NO: 3414 - protein, 9 aa, Artificial Sequence
  Synthetic
FVVPGLPGT

SEQ ID NO: 3415 - protein, 9 aa, Artificial Sequence
  Synthetic
VPGLPGTIL

SEQ ID NO: 3416 - protein, 10 aa, Artificial Sequence
  Synthetic
RTTNGDFLHF

SEQ ID NO: 3417 - protein, 9 aa, Artificial Sequence
  Synthetic
VLAAECTIF

SEQ ID NO: 3418 - protein, 9 aa, Artificial Sequence
  Synthetic
DASGKPVPY

SEQ ID NO: 3419 - protein, 10 aa, Artificial Sequence
  Synthetic
TNVLEGSVAY

SEQ ID NO: 3420 - protein, 9 aa, Artificial Sequence
  Synthetic
GSVAYESLR

SEQ ID NO: 3421 - protein, 9 aa, Artificial Sequence
  Synthetic
RPDTRYVLM

SEQ ID NO: 3422 - protein, 9 aa, Artificial Sequence
  Synthetic
SIIQFPNTY

SEQ ID NO: 3423 - protein, 9 aa, Artificial Sequence
  Synthetic
WVLNNDYYR

SEQ ID NO: 3424 - protein, 9 aa, Artificial Sequence
  Synthetic
SLPGVFCGV

SEQ ID NO: 3425 - protein, 9 aa, Artificial Sequence
  Synthetic
DAVNLLTNM

SEQ ID NO: 3426 - protein, 9 aa, Artificial Sequence
  Synthetic
IVAGGIVAI

SEQ ID NO: 3427 - protein, 9 aa, Artificial Sequence
  Synthetic
LAYYFMRFR

SEQ ID NO: 3428 - protein, 9 aa, Artificial Sequence
  Synthetic
YFMRFRRAF

SEQ ID NO: 3429 - protein, 10 aa, Artificial Sequence
  Synthetic
FGEYSHVVAF

SEQ ID NO: 3430 - protein, 9 aa, Artificial Sequence
  Synthetic
SFLPGVYSV

SEQ ID NO: 3431 - protein, 9 aa, Artificial Sequence
  Synthetic
IYLYLTFYL

SEQ ID NO: 3432 - protein, 10 aa, Artificial Sequence
  Synthetic
YLTNDVSFLA

SEQ ID NO: 3433 - protein, 9 aa, Artificial Sequence
  Synthetic
FLAHIQWMV

SEQ ID NO: 3434 - protein, 9 aa, Artificial Sequence
  Synthetic
MFTPLVPFW

SEQ ID NO: 3435 - protein, 9 aa, Artificial Sequence
  Synthetic
VPFWITIAY

SEQ ID NO: 3436 - protein, 9 aa, Artificial Sequence
  Synthetic
WFFSNYLKR

SEQ ID NO: 3437 - protein, 9 aa, Artificial Sequence
  Synthetic
DVLLPLTQY

SEQ ID NO: 3438 - protein, 9 aa, Artificial Sequence
  Synthetic
LPLTQYNRY

SEQ ID NO: 3439 - protein, 9 aa, Artificial Sequence
  Synthetic
GAMDTTSYR

SEQ ID NO: 3440 - protein, 9 aa, Artificial Sequence
  Synthetic
SNSGSDVLY

SEQ ID NO: 3441 - protein, 9 aa, Artificial Sequence
  Synthetic
LYQPPQTSI

SEQ ID NO: 3442 - protein, 9 aa, Artificial Sequence
  Synthetic
AVLQSGFRK

SEQ ID NO: 3443 - protein, 9 aa, Artificial Sequence
  Synthetic
TANPKTPKY

SEQ ID NO: 3444 - protein, 9 aa, Artificial Sequence
  Synthetic
NPKTPKYKF

SEQ ID NO: 3445 - protein, 9 aa, Artificial Sequence
  Synthetic
IQPGQTFSV

SEQ ID NO: 3446 - protein, 9 aa, Artificial Sequence
  Synthetic
QPGQTFSVL

SEQ ID NO: 3447 - protein, 10 aa, Artificial Sequence
  Synthetic
SPSGVYQCAM

SEQ ID NO: 3448 - protein, 9 aa, Artificial Sequence
  Synthetic
ILTSLLVLV

SEQ ID NO: 3449 - protein, 9 aa, Artificial Sequence
  Synthetic
FLYENAFLP

SEQ ID NO: 3450 - protein, 10 aa, Artificial Sequence
  Synthetic
LPFAMGIIAM

SEQ ID NO: 3451 - protein, 9 aa, Artificial Sequence
  Synthetic
MFVKHKHAF

SEQ ID NO: 3452 - protein, 9 aa, Artificial Sequence
  Synthetic
FVKHKHAFL

SEQ ID NO: 3453 - protein, 10 aa, Artificial Sequence
  Synthetic
LFLLPSLATV

SEQ ID NO: 3454 - protein, 10 aa, Artificial Sequence
  Synthetic
FLLPSLATVA

SEQ ID NO: 3455 - protein, 9 aa, Artificial Sequence
  Synthetic
VYMPASWVM

SEQ ID NO: 3456 - protein, 9 aa, Artificial Sequence
  Synthetic
RIMTWLDMV

SEQ ID NO: 3457 - protein, 9 aa, Artificial Sequence
  Synthetic
WLDMVDTSL

SEQ ID NO: 3458 - protein, 10 aa, Artificial Sequence
  Synthetic
VMYASAVVLL

SEQ ID NO: 3459 - protein, 9 aa, Artificial Sequence
  Synthetic
MYASAVVLL

SEQ ID NO: 3460 - protein, 9 aa, Artificial Sequence
  Synthetic
YASAVVLLI

SEQ ID NO: 3461 - protein, 9 aa, Artificial Sequence
  Synthetic
TLMNVLTLV

SEQ ID NO: 3462 - protein, 9 aa, Artificial Sequence
  Synthetic
FLARGIVFM

SEQ ID NO: 3463 - protein, 9 aa, Artificial Sequence
  Synthetic
IFFITGNTL

SEQ ID NO: 3464 - protein, 9 aa, Artificial Sequence
  Synthetic
GVYDYLVST

SEQ ID NO: 3465 - protein, 10 aa, Artificial Sequence
  Synthetic
YDYLVSTQEF

SEQ ID NO: 3466 - protein, 9 aa, Artificial Sequence
  Synthetic
FRYMNSQGL

SEQ ID NO: 3467 - protein, 9 aa, Artificial Sequence
  Synthetic
GLLPPKNSI

SEQ ID NO: 3468 - protein, 9 aa, Artificial Sequence
  Synthetic
KLNIKLLGV

SEQ ID NO: 3469 - protein, 9 aa, Artificial Sequence
  Synthetic
EAFEKMVSL

SEQ ID NO: 3470 - protein, 9 aa, Artificial Sequence
  Synthetic
SLLSVLLSM

SEQ ID NO: 3471 - protein, 9 aa, Artificial Sequence
  Synthetic
TFTYASALW

SEQ ID NO: 3472 - protein, 9 aa, Artificial Sequence
  Synthetic
AWPLIVTAL

SEQ ID NO: 3473 - protein, 9 aa, Artificial Sequence
  Synthetic
GPKVKYLYF

SEQ ID NO: 3474 - protein, 9 aa, Artificial Sequence
  Synthetic
YFIKGLNNL

SEQ ID NO: 3475 - protein, 9 aa, Artificial Sequence
  Synthetic
YINVFAFPF

SEQ ID NO: 3476 - protein, 9 aa, Artificial Sequence
  Synthetic
NVFAFPFTI

SEQ ID NO: 3477 - protein, 9 aa, Artificial Sequence
  Synthetic
FTIGTVTLK

SEQ ID NO: 3478 - protein, 9 aa, Artificial Sequence
  Synthetic
ATIPIQASL

SEQ ID NO: 3479 - protein, 9 aa, Artificial Sequence
  Synthetic
ALLAVFQSA

SEQ ID NO: 3480 - protein, 9 aa, Artificial Sequence
  Synthetic
QSASKIITL

SEQ ID NO: 3481 - protein, 9 aa, Artificial Sequence
  Synthetic
SASKIITLK

SEQ ID NO: 3482 - protein, 9 aa, Artificial Sequence
  Synthetic
ITLKKRWQL

SEQ ID NO: 3483 - protein, 9 aa, Artificial Sequence
  Synthetic
TLKKRWQLA

SEQ ID NO: 3484 - protein, 9 aa, Artificial Sequence
  Synthetic
NLLLLFVTV

SEQ ID NO: 3485 - protein, 9 aa, Artificial Sequence
  Synthetic
FVTVYSHLL

SEQ ID NO: 3486 - protein, 9 aa, Artificial Sequence
  Synthetic
TVYSHLLLV

SEQ ID NO: 3487 - protein, 9 aa, Artificial Sequence
  Synthetic
VAAGLEAPF

SEQ ID NO: 3488 - protein, 10 aa, Artificial Sequence
  Synthetic
AAGLEAPFLY

SEQ ID NO: 3489 - protein, 9 aa, Artificial Sequence
  Synthetic
AGLEAPFLY

SEQ ID NO: 3490 - protein, 9 aa, Artificial Sequence
  Synthetic
GLEAPFLYL

SEQ ID NO: 3491 - protein, 9 aa, Artificial Sequence
  Synthetic
LEAPFLYLY

SEQ ID NO: 3492 - protein, 9 aa, Artificial Sequence
  Synthetic
APFLYLYAL

SEQ ID NO: 3493 - protein, 9 aa, Artificial Sequence
  Synthetic
FLYLYALVY

SEQ ID NO: 3494 - protein, 9 aa, Artificial Sequence
  Synthetic
LYLYALVYF

SEQ ID NO: 3495 - protein, 9 aa, Artificial Sequence
  Synthetic
FVRIIMRLW

SEQ ID NO: 3496 - protein, 9 aa, Artificial Sequence
  Synthetic
VRIIMRLWL

SEQ ID NO: 3497 - protein, 9 aa, Artificial Sequence
  Synthetic
CRSKNPLLY

SEQ ID NO: 3498 - protein, 9 aa, Artificial Sequence
  Synthetic
NPLLYDANY

SEQ ID NO: 3499 - protein, 10 aa, Artificial Sequence
  Synthetic
IPYNSVTSSI

SEQ ID NO: 3500 - protein, 10 aa, Artificial Sequence
  Synthetic
TTSPISEHDY

SEQ ID NO: 3501 - protein, 9 aa, Artificial Sequence
  Synthetic
HSYFTSDYY

SEQ ID NO: 3502 - protein, 9 aa, Artificial Sequence
  Synthetic
YFTSDYYQL

SEQ ID NO: 3503 - protein, 10 aa, Artificial Sequence
  Synthetic
YFTSDYYQLY

SEQ ID NO: 3504 - protein, 10 aa, Artificial Sequence
  Synthetic
DYYQLYSTQL

SEQ ID NO: 3505 - protein, 9 aa, Artificial Sequence
  Synthetic
HVTFFIYNK

SEQ ID NO: 3506 - protein, 9 aa, Artificial Sequence
  Synthetic
EEHVQIHTI

SEQ ID NO: 3507 - protein, 9 aa, Artificial Sequence
  Synthetic
IYDEPTTTT

SEQ ID NO: 3508 - protein, 10 aa, Artificial Sequence
  Synthetic
HLVDFQVTIA

SEQ ID NO: 3509 - protein, 9 aa, Artificial Sequence
  Synthetic
VTIAEILLI

SEQ ID NO: 3510 - protein, 9 aa, Artificial Sequence
  Synthetic
LIIMRTFKV

SEQ ID NO: 3511 - protein, 9 aa, Artificial Sequence
  Synthetic
TFKVSIWNL

SEQ ID NO: 3512 - protein, 9 aa, Artificial Sequence
  Synthetic
LDYIINLII

SEQ ID NO: 3513 - protein, 10 aa, Artificial Sequence
  Synthetic
QECVRGTTVL

SEQ ID NO: 3514 - protein, 10 aa, Artificial Sequence
  Synthetic
YEGNSPFHPL

SEQ ID NO: 3515 - protein, 9 aa, Artificial Sequence
  Synthetic
EGNSPFHPL

SEQ ID NO: 3516 - protein, 10 aa, Artificial Sequence
  Synthetic
HPLADNKFAL

SEQ ID NO: 3517 - protein, 9 aa, Artificial Sequence
  Synthetic
SPIFLIVAA

SEQ ID NO: 3518 - protein, 9 aa, Artificial Sequence
  Synthetic
QSCTQHQPY

SEQ ID NO: 3519 - protein, 10 aa, Artificial Sequence
  Synthetic
VDDPCPIHFY

SEQ ID NO: 3520 - protein, 10 aa, Artificial Sequence
  Synthetic
RVGARKSAPL

SEQ ID NO: 3521 - protein, 9 aa, Artificial Sequence
  Synthetic
EPKLGSLVV

SEQ ID NO: 3522 - protein, 9 aa, Artificial Sequence
  Synthetic
EYHDVRVVL

1.-16. (canceled)

17. A composition comprising monomers or multimers of:
one or more peptides or proteins comprising:
one or more amino acid sequences selected from those sequences set forth in Tables 1 to 10 (SEQ ID NOS: 1 to 3522),
concatemers, subsequences, portions, homologues, variants or derivatives thereof;
a fusion protein comprising one or more amino acid sequences selected from those sequences set forth in Tables 1 to 10 (SEQ ID NOS: 1 to 3522); or
a polynucleotide that encodes one or more peptides or proteins, comprising, consisting of, or consisting essentially of an amino acid sequence selected from those sequences set forth in Tables 1 to 10 (SEQ ID NOS: 1 to 3522), or a subsequence, portion, homologue, variant or derivative thereof;
one or more peptide-major histocompatibility complex (MHC) monomers or multimers, wherein the peptide-MHC monomer or multimer comprises a peptide comprising, consisting of, or consisting essentially of an amino acid sequence selected from those sequences set forth in Tables 1 to 10 (SEQ ID NOS: 1 to 3522), in a groove of the MHC monomer or multimer;
one or more peptides or proteins comprising, consisting of, or consisting essentially of an amino acid sequence selected from those sequences set forth in Tables 1 to 10 (SEQ ID NOS: 1 to 3522), or a subsequence, portion, homologue, variant or derivative thereof;
a fusion protein comprising one or more amino acid sequences selected from those sequences set forth in Tables 1 to 10 (SEQ ID NOS: 1 to 3522);
a pool of 2 or more peptides selected from those sequences set forth in Tables 1 to 10 (SEQ ID NOS: 1 to 3522); or
a polynucleotide that encodes one or more peptides or proteins, comprising, consisting of, or consisting essentially of an amino acid sequence selected from those sequences set forth in Tables 1 to 10 (SEQ ID NOS: 1 to 3522), or a subsequence, portion, homologue, variant or derivative thereof.

18.-34. (canceled)

35. The composition of claim 1, wherein the composition comprises one or more peptide-major histocompatibility complex (MHC) monomers or multimers, wherein the peptide-MHC monomer or multimer comprises a peptide comprising, consisting of, or consisting essentially of an amino acid sequence selected from those sequences set forth in Tables 1 to 10 (SEQ ID NOS: 1 to 3522), in a groove of the (MHC) monomer or multimer, or wherein the compositions include those amino acid sequences selected from Tables 1, 2, 3, 4, 5, 6, 7, 8, 9, or 10 (SEQ ID NOS: 1 to 3522).

36. (canceled)

37. A method for detecting the presence of: (i) a coronavirus or (ii) an immune response relevant to coronavirus infections, vaccines or therapies, including T cells responsive to one or more coronavirus peptides, comprising:
providing one or more proteins or peptides for detection of an amount or a relative amount of, and/or the activity of, and/or the state of antigen-specific T-cells;
contacting a biological sample suspected of having coronavirus-specific T-cells to one or more proteins or peptides for detection; and
detecting an amount or a relative amount of, and/or the activity of, and/or the state of antigen-specific T-cells in the biological sample, wherein the one or more proteins or peptides for detection comprise one or more amino acid sequences set forth in Tables 1 to 10 (SEQ ID NOS: 1 to 3522), or comprise a pool of 2 or more amino acid sequences set forth in Tables 1 to 10 (SEQ ID NOS: 1 to 3522).

38. The method of claim 37, further comprising at least one of:
detecting the amount or a relative amount of, and/or activity of antigen-specific T-cells comprises one or more steps of identification or detection of the antigen-specific T-cells and measuring the amount of the antigen-specific T-cells; or
detecting the presence or amount of the one or more peptides in a biological sample, or a response thereto, which is diagnostic of a coronavirus infection;
detecting an amount or a relative amount of, and/or the activity of, and/or the state of antigen-specific T-cells in the biological sample comprises measuring one or more of a cytokine or lymphokine secretion assay, T cell proliferation, immunoprecipitation, immunoassay, ELISA, radioimmunoassay, immunofluorescence assay, Western Blot, FACS analysis, a competitive immunoassay, a noncompetitive immunoassay, a homogeneous immunoassay a heterogeneous immunoassay, a bioassay, a reporter assay, a luciferase assay, a microarray, a surface plasmon resonance detector, a florescence resonance energy transfer, immunocytochemistry, or a cell mediated assay, or a cytokine proliferation assay;
detecting an immune response relevant to the coronavirus comprises the following steps:
providing an MHC monomer or an MHC multimer;
contacting a population T-cells to the MHC monomer or MHC multimer; and
measuring the number, activity or state of T-cells specific for the MHC monomer or MHC multimer; or
further comprises administering a treatment comprising the composition to the subject from which the biological sample was drawn that increases the amount or relative amount of, and/or activity of the antigen-specific T-cells;
the one or more peptides or proteins comprises 2 or more amino acid sequences selected from Tables 1 to 10 (SEQ ID NOS: 1 to 3522);
the one or more peptides or proteins comprises 2 or more amino acid sequences selected from Tables 1 to 10 (SEQ ID NOS: 1 to 3522);
the detecting the amount or a relative amount of, and/or activity of antigen-specific T-cells comprises indirect detection and/or direct detection;
the MHC monomer or MHC multimer comprises a protein or peptide of the coronavirus;
the protein or peptide comprises a CD8+ or CD4+ T cell epitope;
the T cell epitope is not conserved in another coronavirus;
the T cell epitope is conserved in another coronavirus;
the protein or peptide has a length from about 9-15, 15-20, 20-25, 25-30, 30-40, 40-50, 50-75 or 75-100 amino acids;
the proteins or peptides comprise 2 or more amino acid sequences selected from those sequences set forth in Tables 1, 2, 3, 4, 5, 6, 7, 8, 9, or 10 (SEQ ID NOS: 1 to 3522), or a subsequence, portion, homologue, variant or derivative thereof; or
detecting the presence of: (i) SARS-CoV-2 or (ii) an immune response relevant to SARS-CoV-2 infections, vaccines or therapies, including T cells responsive to one or more SARS-CoV-2 peptides, comprising:
providing one or more proteins or peptides for detection of an amount or a relative amount of, and/or the activity of, and/or the state of antigen-specific T-cells;
contacting a biological sample suspected of having SARS-CoV-2-specific T-cells to one or more proteins or peptides for detection; and
detecting an amount or a relative amount of, and/or the activity of, and/or the state of antigen-specific T-cells in the biological sample, wherein the one or more proteins or peptides for detection comprise one or more amino acid sequences set forth in those sequences set forth in Tables 1 to 10 (SEQ ID NOS: 1 to 3522), or comprise a pool of 2 or more amino acid sequences set forth in those sequences set forth in Tables 1 to 10 (SEQ ID NOS: 1 to 3522).

39.-64. (canceled)

65. The method of claim 37, wherein detecting a coronavirus infection or exposure in a subject, the method comprising, consisting of, or consisting essentially of:
contacting a biological sample from a subject with a peptide monomer or multimer composition of any one of SEQ ID NOS: 1 to 3522; and
determining if the composition elicits an immune response from the contacted cells, wherein the presence of an immune response indicates that the subject has been exposed to or infected with coronavirus; or
wherein the sample comprises T cells and the response comprises inducing, increasing, promoting or stimulating anti-coronavirus activity of T cells.
the T cells are CD8+ or CD4+ T cells;
determining whether the subject has been infected by or exposed to the coronavirus more than once by determining if the subject elicits a secondary T cell immune response profile that is different from a primary T cell immune response profile;
diagnosing a coronavirus infection or exposure in a subject, the method comprising contacting a biological sample from a subject with the composition, and determining if the composition elicits a T cell immune response, wherein the T cell immune response identifies that the subject has been infected with or exposed to a coronavirus;
wherein the method is conducted three or more days following the date of suspected infection by or exposure to a coronavirus; or
determining if the composition elicits an immune response from the contacted cells, wherein the presence of an immune response indicates that the subject has been exposed to or infected with SARS-CoV-2.

66.-78. (canceled)

79. A kit for the detection of coronavirus or an immune response to coronavirus in a subject comprising, consisting of or consisting essentially of:
one or more T cells that specifically detect the presence of:
one or more amino acid sequences selected from those sequences set forth in Tables 1 to 10 (SEQ ID NOS: 1 to 3522), or a subsequence, portion, homologue, variant or derivative thereof; or
a fusion protein comprising one or more amino acid sequences selected from those sequences set forth in Tables 1 to 10 (SEQ ID NOS: 1 to 3522); or
a pool of 2 or more peptides selected from the amino acid sequences set forth in Tables 1 to 10 (SEQ ID NOS: 1 to 3522).

80. The kit of claim 79, wherein at least one of:
the one or more amino acid sequences are selected from a coronavirus T cell epitope set forth in Tables 1 to 10 (SEQ ID NOS: 1 to 3522);
the composition comprises: one or more amino acid sequences selected from those sequences set forth in Tables 1 to 10 (SEQ ID NOS: 1 to 3522), or a subsequence, portion, homologue, variant or derivative thereof;
a fusion protein comprising one or more amino acid sequences selected from those sequences set forth in Tables 1 to 10 (SEQ ID NOS: 1 to 3522); or
a pool of 2 or more peptides selected from the amino acid sequences set forth in those sequences set forth in Tables 1 to 10 (SEQ ID NOS: 1 to 3522).
the amino acid sequence comprises a coronavirus CD8+ or CD4+ T cell epitope;
the T cell epitope is not conserved in another coronavirus;
the T cell epitope is conserved in another coronavirus;
the fusion protein has a length from about 9-15, 15-20, 20-25, 25-30, 30-40, 40-50, 50-75 or 75-100 amino acids;
the kit includes instruction for a diagnostic method, a process, a composition, a product, a service or component part thereof for the detection of: (i) coronavirus or (ii) an immune response relevant to coronavirus infections, vaccines or therapies, including T cells responsive to coronavirus;
the kit includes reagents for detecting an amount or a relative amount of, and/or the activity of, and/or the state of antigen-specific T-cells in the biological sample comprises measuring one or more of a cytokine or lymphokine secretion assay, T cell proliferation, immunoprecipitation, immunoassay, ELISA, radioimmunoassay, immunofluorescence assay, Western Blot, FACS analysis, a competitive immunoassay, a noncompetitive immunoassay, a homogeneous immunoassay a heterogeneous immunoassay, a bioassay, a reporter assay, a luciferase assay, a microarray, a surface plasmon resonance detector, a florescence resonance energy transfer, immunocytochemistry, or a cell mediated assay, or a cytokine proliferation assay;
the kit includes reagents for determining a Human Leukocyte Antigen (HLA) profile of a subject, and selecting peptides that are presented by the HLA profile of the subject for detecting an immune response to coronavirus; or
wherein detection of SARS-CoV-2 or an immune response to SARS-CoV-2 in a subject comprising, consisting of or consisting essentially of:
one or more T cells that specifically detect the presence of:
one or more amino acid sequences selected from those sequences set forth in Tables 1 to 10 (SEQ ID NOS: 1 to 3522), or a subsequence, portion, homologue, variant or derivative thereof;
a fusion protein comprising one or more amino acid sequences selected from those sequences set forth in Tables 1 to 10 (SEQ ID NOS: 1 to 3522); or
a pool of 2 or more peptides selected from the amino acid sequences set forth in those sequences set forth in Tables 1 to 10 (SEQ ID NOS: 1 to 3522).

81.-98. (canceled)

99. A method of stimulating, inducing, promoting, increasing, or enhancing an immune response against a coronavirus in a subject, comprising:
administering a composition of one or more monomers or multimers selected from any one of SEQ ID NOS: 1 to 3522, in an amount sufficient to stimulate, induce, promote, increase, or enhance an immune response against the coronavirus in the subject.

100. The method of claim 99, wherein at least one of:
the immune response provides the subject with protection against a coronavirus infection or pathology, or one or more physiological conditions, disorders, illnesses, diseases or symptoms caused by or associated with coronavirus infection or pathology; or the immune response is specific to: one or more SARS-CoV-2 peptides selected from the amino acid sequences set forth in Tables 1 to 10 (SEQ ID NOS: 1 to 3522), or a subsequence, portion, homologue, variant or derivative thereof;
wherein the one or more monomers or multimers selected from any one of SEQ ID NOS: 1 to 3522 provides the subject with protection against a SARS-CoV-2 infection or pathology, or one or more physiological conditions, disorders, illnesses, diseases or symptoms caused by or associated with SARS-CoV-2 infection or pathology; or
wherein stimulating, inducing, promoting, increasing, or enhancing an immune response against SARS-CoV-2 in a subject, comprises administering to a subject an amount of a protein or peptide or a polynucleotide that expresses the protein or peptide comprising, consisting of or consisting essentially of an amino acid sequence of the SARS-CoV-2 spike, nucleoprotein, membrane, replicase polyprotein lab, protein 3a, envelope small membrane protein, non-structural protein 3b, protein 7a, protein 9b, non-structural protein 6, or non-structural protein 8a protein or peptide, or a variant, homologue, derivative or subsequence thereof, wherein the protein or peptide comprises at least two peptides selected from the amino acid sequences set forth in Tables 1 to 10 (SEQ ID NOS: 1 to 3522), or both or a subsequence, portion, homologue, variant or derivative thereof, in an amount sufficient to prevent, stimulate, induce, promote, increase, immunize against, or enhance an immune response against SARS-CoV-2 in the subject.

101.-109. (canceled)

110. The method of claim 99, wherein at least one of:
the anti-SARS-CoV-2 T cell response is a CD8+, a CD4+ T cell response, or both;
the T cell epitope is conserved across two or more clinical isolates of SARS-CoV-2, two or more circulating forms of SARS-CoV-2, or two or more coronaviruses;
the SARS-CoV-2 infection is an acute infection;
the subject is a mammal or a human;
reducing SARS-CoV-2 viral titer, increases or stimulates SARS-CoV-2 viral clearance,
reduces or inhibits SARS-CoV-2 viral proliferation, reduces or inhibits increases in SARS-CoV-2 viral titer or SARS-CoV-2 viral proliferation, reduces the amount of a SARS-CoV-2 viral protein or the amount of a SARS-CoV-2 viral nucleic acid, or reduces or inhibits synthesis of a SARS-CoV-2 viral protein or a SARS-CoV-2 viral nucleic acid;
reducing one or more adverse physiological conditions, disorders, illness, diseases, symptoms or complications caused by or associated with SARS-CoV-2 infection or pathology;
improving one or more adverse physiological conditions, disorders, illness, diseases, symptoms or complications caused by or associated with SARS-CoV-2 infection or pathology; =, and wherein the symptom is fever or chills, cough, shortness of breath or difficulty breathing, fatigue, muscle or body aches, headache, new loss of taste or smell, sore throat, congestion or runny nose, nausea or vomiting, or diarrhea;
reducing or inhibiting susceptibility to SARS-CoV-2 infection or pathology;
the protein or peptide, or a subsequence, portion, homologue, variant or derivative thereof, is administered prior to, substantially contemporaneously with or following exposure to or infection of the subject with SARS-CoV-2;
a plurality of SARS-CoV-2 T cell epitopes are administered prior to, substantially contemporaneously with or following exposure to or infection of the subject with SARS-CoV-2;
the protein or peptide, or a subsequence, portion, homologue, variant or derivative thereof is administered within 2-72 hours, 2-48 hours, 4-24 hours, 4-18 hours, or 6-12 hours after a symptom
the protein or peptide, or a subsequence, portion, homologue, variant or derivative thereof is administered prior to exposure to or infection of the subject with SARS-CoV-2;
the method further comprises administering a modulator of immune response prior to, substantially contemporaneously with or following the administration to the subject of an amount of a protein or peptide;
wherein the modulator of immune response is a modulator of the innate immune response;
the modulator is IL-6, IFN-γ, TGF-β, or IL-10, or an agonist or antagonist thereof; or
the one or amino acid sequences include amino acid sequences selected from Tables 1 to 10 (SEQ ID NOS: 1 to 3522).

111.-126. (canceled)

127. A method of treating, preventing, or immunizing a subject against SARS-CoV-2 infection, comprising administering to a subject one or more monomers or multimers selected from any one of SEQ ID NOS: 1 to 3522 in an amount sufficient to treat, prevent, or immunize the subject for SARS-CoV-2 infection.

128. The method of claim 127, wherein at least one of:
the SARS-CoV-2 infection is an acute infection;
the composition reduces SARS-CoV-2 viral titer, increases or stimulates SARS-CoV-2 viral clearance, reduces or inhibits SARS-CoV-2 viral proliferation, reduces or inhibits increases in SARS-CoV-2 viral titer or SARS-CoV-2 viral proliferation, reduces the amount of a SARS-CoV-2 viral protein or the amount of a SARS-CoV-2 viral nucleic acid, or reduces or inhibits synthesis of a SARS-CoV-2 viral protein or a SARS-CoV-2 viral nucleic acid;
the composition reduces one or more adverse physiological conditions, disorders, illness, diseases, symptoms or complications caused by or associated with SARS-CoV-2 infection or pathology;
the composition improves one or more adverse physiological conditions, disorders, illness, diseases, symptoms or complications caused by or associated with SARS-CoV-2 infection or pathology, wherein the symptom is fever or chills, cough, shortness of breath or difficulty breathing, fatigue, muscle or body aches, headache, new loss of taste or smell, sore throat, congestion or runny nose, nausea, vomiting, or diarrhea;
the composition method reduces or inhibits susceptibility to SARS-CoV-2 infection or pathology;
the composition is administered prior to, substantially contemporaneously with or following exposure to or infection of the subject with SARS-CoV-2;
the composition is administered prior to, substantially contemporaneously with or following exposure to or infection of the subject with SARS-CoV-2;
the composition is administered within 2-72 hours, 2-48 hours, 4-24 hours, 4-18 hours, or 6-12 hours after a symptom of SARS-CoV-2 infection or exposure develops; or
the composition is administered prior to exposure to or infection of the subject with SARS-CoV-2.

129.-137. (canceled)

138. The composition of claim 1, further defined as a peptide or peptides that are immunoprevalent or immunodominant in a virus obtained by a method consisting of, or consisting essentially of:
obtaining an amino acid sequence of the virus;
determining one or more sets of overlapping peptides spanning one or more virus antigen using unbiased selection;
synthesizing one or more pools of virus peptides comprising the one or more sets of overlapping peptides;
combining the one or more pools of virus peptides with Class I major histocompatibility proteins (MHC), Class II MHC, or both Class I and Class II MHC to form peptide-MHC complexes;
contacting the peptide-MHC complexes with T cells from subjects exposed to the virus;
determining which pools triggered cytokine release by the T cells; and
deconvoluting from the pool of peptides that elicited cytokine release by the T cells, which peptide or peptides are immunoprevalent or immunodominant in the pool; or
the virus is a SARS-CoV-2 coronavirus and the immunodominant peptides are selected from 1, 2 or more peptides selected from the amino acid sequences set forth in Tables 1 to 10 (SEQ ID NOS: 1 to 3522);
wherein the immunodominant peptides are selected from 1, 2 or more peptides selected from the amino acid sequences set forth in those sequences set forth in Tables 1 to 10 (SEQ ID NOS: 1 to 3522); or
the peptide or peptides include amino acid sequences set forth in Tables 1 to 10 (SEQ ID NOS: 1 to 3522).

139.-143. (canceled)

144. A method of selecting an immunoprevalent or immunodominant peptide or protein of a virus comprising, consisting of, or consisting essentially of:
obtaining an amino acid sequence of the virus;
determining one or more sets of overlapping peptides spanning one or more virus antigen using unbiased selection;
synthesizing one or more pools of virus peptides comprising the one or more sets of overlapping peptides;
combining the one or more pools of virus peptides with Class I major histocompatibility proteins (MHC), Class II MHC, or both Class I and Class II MHC to form peptide-MHC complexes;
contacting the peptide-MHC complexes with T cells from subjects exposed to the virus;
determining which pools triggered cytokine release by the T cells; and
deconvoluting from the pool of peptides that elicited cytokine release by the T cells, which peptide or peptides are immunoprevalent or immunodominant in the pool.

145. The method of claim 144, wherein at least one of:
the virus is a coronavirus;
the coronavirus is SARS-CoV-2;
the immunodominant peptides are selected from 1, 2 or more peptides selected from the amino acid sequences set forth in Tables 1 to 10 (SEQ ID NOS: 1 to 3522);
wherein the immunodominant peptides are selected from 1, 2 or more peptides selected from the amino acid sequences set forth in those sequences set forth in Tables 1 to 10 (SEQ ID NOS: 1 to 3522); or
the peptide or peptides include amino acid sequences set forth in Tables 1 to 10 (SEQ ID NOS: 1 to 3522).

146.-149. (canceled)

150. A polynucleotide that expresses one or more peptides or proteins, comprising, consisting of, or consisting essentially of an amino acid sequence selected from those sequences set forth in Tables 1 to 10 (SEQ ID NOS: 1 to 3522), or a subsequence, portion, homologue, variant or derivative thereof;
a fusion protein comprising one or more amino acid sequences selected from those sequences set forth in Tables 1 to 10 (SEQ ID NOS: 1 to 3522); or
a pool of 2 or more peptides comprising, consisting of, or consisting essentially of amino acid sequences selected from those sequences set forth in Tables 1 to 10 (SEQ ID NOS: 1 to 3522).

151. The polynucleotide of claim 150, further comprising a vector or a viral vector.

152. (canceled)

153. The polynucleotide of claim 151, wherein the vector or viral vector is in a host cell.

154.-157. (canceled)

158. A peptide-major histocompatibility complex (MHC)/peptide multimer comprising at least two MHC/peptide monomers, wherein at least one MHC/peptide monomer comprises a peptide derived from SARS-CoV-2.

159. The peptide-major histocompatibility complex (MHC)/peptide multimer comprising one or more monomers or multimers selected from any one of SEQ ID NOS: 1 to 3522, wherein at least one MHC/peptide monomer comprises a peptide that comprises, consists of, or consists essentially of an amino acid sequence selected from the sequences set forth in Tables 1 to 10 (SEQ ID NOS: 1 to 3522);
wherein at least one MHC/peptide monomer comprises a peptide derived from SARS-CoV-2 Spike (S) protein such as a SARS-CoV-2 Spike (S) protein derived peptide set forth in Tables 1 to 10 (SEQ ID NOS: 1 to 3522);
wherein at least one MHC/peptide monomer comprises a peptide derived from SARS-CoV-2 Membrane (M) protein such as a SARS-CoV-2 Membrane (M) protein derived peptide set forth in Tables 1 to 10 (SEQ ID NOS: 1 to 3522);
wherein at least one MHC/peptide monomer comprises a peptide derived from SARS-CoV-2 Nucleocapsid (N) protein such as a SARS-CoV-2 Nucleocapsid (N) protein derived peptide set forth in Tables 1 to 10 (SEQ ID NOS: 1 to 3522);
wherein at least one MHC/peptide monomer comprises a peptide derived from SARS-CoV-2 Envelope (E) protein such as a SARS-CoV-2 Envelope (E) protein derived peptide set forth in Tables 1 to 10 (SEQ ID NOS: 1 to 3522);
wherein at least one NHC/peptide monomer comprises a peptide derived from SARS-CoV-2 ORF3a protein such as a SARS-CoV-2 ORF3a protein derived peptide set forth in Tables 1 to 10 (SEQ ID NOS: 1 to 3522);
wherein at least one MHC/peptide monomer comprises a peptide derived from SARS-CoV-2 ORF6 protein such as a SARS-CoV-2 ORF6 protein derived peptide set forth in Tables 1 to 10 (SEQ ID NOS: 1 to 3522);
wherein at least one MHC/peptide monomer comprises a peptide derived from SARS-CoV-2 ORF7a protein such as a SARS-CoV-2 ORF7a protein derived peptide set forth in Tables 1 to 10 (SEQ ID NOS: 1 to 3522);
wherein at least one MHC/peptide monomer comprises a peptide derived from SARS-CoV-2 ORF7b protein such as a SARS-CoV-2 ORF7b protein derived peptide set forth in Tables 1 to 10 (SEQ ID NOS: 1 to 3522);
wherein at least one MHC/peptide monomer comprises a peptide derived from SARS-CoV-2 ORF8 protein such as a SARS-CoV-2 ORF8 protein derived peptide set forth in Tables 1 to 10 (SEQ ID NOS: 1 to 3522);
wherein at least one MHC/peptide monomer comprises a peptide derived from SARS-CoV-2 ORF10 protein such as a SARS-CoV-2 ORF10 protein derived peptide set forth in Tables 1 to 10 (SEQ ID NOS: 1 to 3522);
wherein at least one MHC/peptide monomer comprises a peptide derived from SARS-CoV-2 nsp1 protein such as a SARS-CoV-2 nsp1 protein derived peptide set forth in Tables 1 to 10 (SEQ ID NOS: 1 to 3522);
wherein at least one MHC/peptide monomer comprises a peptide derived from SARS-CoV-2 nsp2 protein such as a SARS-CoV-2 nsp2 protein derived peptide set forth in Tables 1 to 10 (SEQ ID NOS: 1 to 3522);
wherein at least one MHC/peptide monomer comprises a peptide derived from SARS-CoV-2 nsp3 protein such as a SARS-CoV-2 nsp3 protein derived peptide set forth in Tables 1 to 10 (SEQ ID NOS: 1 to 3522);
wherein at least one MHC/peptide monomer comprises a peptide derived from SARS-CoV-2 nsp4 protein such as a SARS-CoV-2 nsp4 protein derived peptide set forth in Tables 1 to 10 (SEQ ID NOS: 1 to 3522);
wherein at least one MHC/peptide monomer comprises a peptide derived from SARS-CoV-2 nsp5 protein such as a SARS-CoV-2 nsp5 protein derived peptide set forth in Tables 1 to 10 (SEQ ID NOS: 1 to 3522);
wherein at least one MHC/peptide monomer comprises a peptide derived from SARS-CoV-2 nsp6 protein such as a SARS-CoV-2 nsp6 protein derived peptide set forth in Tables 1 to 10 (SEQ ID NOS: 1 to 3522);
wherein at least one MHC/peptide monomer comprises a peptide derived from SARS-CoV-2 nsp7 protein such as a SARS-CoV-2 nsp7 protein derived peptide set forth in Tables 1 to 10 (SEQ ID NOS: 1 to 3522);
wherein at least one MHC/peptide monomer comprises a peptide derived from SARS-CoV-2 nsp8 protein such as a SARS-CoV-2 nsp8 protein derived peptide set forth in Tables 1 to 10 (SEQ ID NOS: 1 to 3522);
wherein at least one MHC/peptide monomer comprises a peptide derived from SARS-CoV-2 nsp9 protein such as a SARS-CoV-2 nsp9 protein derived peptide set forth in Tables 1 to 10 (SEQ ID NOS: 1 to 3522);
wherein at least one MHC/peptide monomer comprises a peptide derived from SARS-CoV-2 nsp10 protein such as a SARS-CoV-2 nsp10 protein derived peptide set forth in Tables 1 to 10 (SEQ ID NOS: 1 to 3522);
wherein at least one MHC/peptide monomer comprises a peptide derived from SARS-CoV-2 nsp12 protein such as a SARS-CoV-2 nsp12 protein derived peptide set forth in Tables 1 to 10 (SEQ ID NOS: 1 to 3522);
wherein at least one MHC/peptide monomer comprises a peptide derived from SARS-CoV-2 nsp13 protein such as a SARS-CoV-2 nsp13 protein derived peptide set forth in Tables 1 to 10 (SEQ ID NOS: 1 to 3522);
wherein at least one MHC/peptide monomer comprises a peptide derived from SARS-CoV-2 nsp14 protein such as a SARS-CoV-2 nsp14 protein derived peptide set forth in Tables 1 to 10 (SEQ ID NOS: 1 to 3522);
wherein at least one MHC/peptide monomer comprises a peptide derived from SARS-CoV-2 nsp15 protein such as a SARS-CoV-2 nsp15 protein derived peptide set forth in Tables 1 to 10 (SEQ ID NOS: 1 to 3522);
wherein at least one MHC/peptide monomer comprises a peptide derived from SARS-CoV-2 nsp16 protein such as a SARS-CoV-2 nsp16 protein derived peptide set forth in Tables 1 to 10 (SEQ ID NOS: 1 to 3522);
wherein at least one MHC/peptide monomer comprises a peptide comprising, consisting of, or consisting essentially of an amino acid sequence selected from the SARS-CoV-2 B.1.1.529 derived sequences set forth in Table 8 (SEQ ID NOS: 2571 to 2615);
wherein at least one MHC/peptide monomer comprises a peptide comprising, consisting of, or consisting essentially of an amino acid sequence selected from the SARS-CoV-2 derived sequences set forth in Table 1 (SEQ ID NOS: 1 to 1468);
wherein at least one MHC/peptide monomer comprises a peptide comprising, consisting of, or consisting essentially of an amino acid sequence selected from the SARS-CoV-2 derived sequences set forth in Table 2 (SEQ ID NOS: 1469 to 1521) (CD8S(D) megapool);
wherein at least one MHC/peptide monomer comprises a peptide comprising, consisting of, or consisting essentially of an amino acid sequence selected from the SARS-CoV-2 derived sequences set forth in Table 3 (SEQ ID NOS: 1522 to 1665) (CD8S (ND) megapool);
wherein at least one MHC/peptide monomer comprises a peptide comprising, consisting of, or consisting essentially of an amino acid sequence selected from the SARS-CoV-2 derived sequences set forth in Table 4 (SEQ ID NOS: 1666 to 1818) (CD8R(D) megapool);
wherein at least one MHC/peptide monomer comprises a peptide comprising, consisting of, or consisting essentially of an amino acid sequence selected from the SARS-CoV-2 derived sequences set forth in Table 5 (SEQ ID NOS: 1819 to 2286) (CD8R(ND) megapool);
wherein at least one MHC/peptide monomer comprises a peptide comprising, consisting of, or consisting essentially of an amino acid sequence selected from the SARS-CoV-2 derived sequences set forth in Table 6 (SEQ ID NOS: 2287 to 2355) (CD4R(D) megapool);
wherein at least one MHC/peptide monomer comprises a peptide comprising, consisting of, or consisting essentially of an amino acid sequence selected from the SARS-CoV-2 derived sequences set forth in Table 7 (SEQ ID NOS: 2356 to 2570) (CD4R(ND) megapool);
wherein at least one MHC/peptide monomer comprises a peptide comprising, consisting of, or consisting essentially of an amino acid sequence selected from the SARS-CoV-2 derived sequences set forth in Table 9 (SEQ ID NOS: 2616 to 2900) (CD4RE megapool);
wherein at least one MHC/peptide monomer comprises a peptide comprising, consisting of, or consisting essentially of an amino acid sequence selected from the SARS-CoV-2 derived sequences set forth in Table 10 (SEQ ID NOS: 2901 to 3522) (CD8RE megapool);
wherein the at least two MHC/peptide monomers are identical;
wherein the MHC/peptide multimer comprise at least 3, such as at least 4, 5, 6, 7, 8, 9, 10, 11, 12, 13, 14, 15, 16, 17, 18, 19 or 20 MHC/peptide monomers;
wherein the MHC/peptide multimer comprise at least 3, such as at least 4, 5, 6, 7, 8, 9, 10, 11, 12, 13, 14, 15, 16, 17, 18, 19 or 20 identical MHC/peptide monomers;
wherein the MHC/peptide multimer comprise at least 3, such as at least 4, 5, 6, 7, 8, 9, 10, 11, 12, 13, 14, 15, 16, 17, 18, 19 or 20 different MHC/peptide monomers;
wherein at least 3, such as at least 4, 5, 6, 7, 8, 9, 10, 11, 12, 13, 14, 15, 16, 17, 18, 19 or 20 of the MHC/peptide monomers comprises a peptide which comprises, consists of, or consists essentially of an amino acid sequence selected from the sequences set forth in Tables 1 to 10 (SEQ ID NOS: 1 to 3522);
wherein at least 3, 4, 5, 6, 7, 8, 9, 10, 11, 12, 13, 14, 15, 16, 17, 18, 19 or 20 of the MHC/peptide monomers comprises a peptide which comprises, consists of, or consists essentially of an amino acid sequence selected from the SARS-CoV-2 B.1.1.529 derived sequences set forth in Table 8 (SEQ ID NOS: 2571 to 2615);
wherein at least 3, 4, 5, 6, 7, 8, 9, 10, 11, 12, 13, 14, 15, 16, 17, 18, 19 or 20 of the MHC/peptide monomers comprises a peptide which comprises, consists of, or consists essentially of an amino acid sequence selected from the SARS-CoV-2 Spike (S) protein, Membrane (M) protein, Nucleocapsid (N) protein, Envelope (E) protein, ORF3a, ORF7a, ORF8, nsp1, nsp2, nsp3, nsp6, nsp9, nsp10, nsp12, nsp13, nsp14 and/or nsp15 derived sequences set forth in Tables 1 to 10 (SEQ ID NOS: 1 to 3522);
wherein each MHC/peptide monomer of the MHC/peptide multimer is associated with one or more multimerization domains such as a multimerization domain selected from the group consisting of proteins, peptides, albumins, immunoglobulins, coiled-coil helixes, polynucleotides, IgG, streptavidin, avidin, streptactin, micelles, cells, polymers, dextran, polysaccharides, beads and other types of solid support, and small organic molecules carrying reactive groups or carrying chemical motifs that can bind MHC/peptide monomers;
wherein the multimer comprises no more than 30 MHC/peptide monomers in total, such as no more than 25 MHC/peptide monomers, such as no more than 20 MHC/peptide monomers, such as no more than 15 MHC/peptide monomers, or no more than 10 MHC/peptide monomers in total;
wherein the MHC/peptide multimer comprises from 2 to 50 MHC/peptide monomers, such as from 2 to 4 MHC/peptide monomers, such as from 4 to 6 MHC/peptide monomers, such as from 6 to 8 MHC/peptide monomers, such as from 8 to 10 MHC/peptide monomers, such as from 10 to 12 MHC/peptide monomers, such as from 12 to 14 MHC/peptide monomers, such as from 14 to 16 MHC/peptide monomers, such as from 16 to 18 MHC/peptide monomers, such as from 18 to 20 MHC/peptide monomers, such as from 20 to 25 MHC/peptide monomers, such as from 25 to 30 MHC/peptide monomers, such as from 30 to 40 MHC/peptide monomers, such as from 40 to 50 MHC/peptide monomers, such as from 10 to 20 MHC/peptide monomers or any combination of these intervals;
wherein the MHC/peptide multimer comprises at least 2, 3, 4, 5, 6, 7, 8, 9, 10, 11, 12, 13, 14, 15, 16, 17, 18, 19, 20, 21, 22, 23, 24 or 25 MHC/peptide monomers or has 2, 3, 4, 5, 6, 7, 8, 9, 10, 11, 12, 13, 14, 15, 16, 17, 18, 19, 20, 21, 22, 23, 24 or 25 MHC/peptide monomers in total;
wherein the MHC/peptide multimer comprises MHC Class I/peptide monomers or wherein all MHC monomers of the MHC/peptide multimer are MHC Class I/peptide monomers;
wherein the MHC/peptide multimer comprises MHC Class II/peptide monomers or wherein all MHC/peptide monomers of the MHC/peptide multimer are MHC Class II/peptide monomers;
wherein the MHC/peptide multimer comprises MHC Class I/peptide and MHC Class II/peptide monomers or wherein all MHC/peptide monomers of the MHC/peptide multimer are either MHC Class I/peptide monomers or MHC Class II/peptide monomers;
wherein some of the MHC/peptide monomers or all of the MHC/peptide monomers have identical peptides;
wherein some of the MHC/peptide monomers or all of the MHC/peptide monomers have different peptides;
wherein at least 2, such as at least 3, 4, 5, 6, 7, 8, 9, 10, 11, 12, 13, 1, 15, 16, 17, 18, 19 or 20 of the MHC/peptide monomers comprise different peptides;
wherein the MHC/peptide multimer further comprises one or more labels such as at least two labels;
wherein the labels are different or at least some of the labels are different;
wherein the labels comprise at least one fluorescent label;
2wherein the labels comprise at least one oligonucleotide label such as a nucleic acid molecule comprises or consists of DNA, RNA, and/or artificial nucleotides such as PLA or LNA;
wherein the labels comprise at least one fluorescent label and at least one oligonucleotide label;
wherein the label is an oligonucleotide comprising one or more of: barcode region. 5′ first primer region (forward), 3′ second primer region (reverse), random nucleotide region, connector molecule, stability-increasing components, short nucleotide linkers in between any of the above-mentioned components, adaptors for sequencing, and annealing region;
wherein the labels comprise at least one such as one or more labels selected from the group consisting of APC, APC-Cy7, ABC-H7, APC-R700, Alexa Flours™ 488, Alexa Flours™555, Alexa Flours™647, Alexa Flours™700, AmCyan, BB151, BB700, BUV395, BUV496, BUV563, BUV615, BUV661, BUV737, BUV805, BV421, BV480, BV510, BV605, BV711, BV750, BV786, FITC, PE, PE-CF594, PE-Cy5, PE-CY5.5, PE-cy7, Pasific Blue, PERCP, pPerCp-Cy5.5, PE, R718, RY586, V450, V500, cFluor®B515, cFluor®B532, cFluor®B548, cFluor®B675, cFluor®B690, cFluor®BY575, cFluor®BY610, cFluor®BY667, cFluor®BY710, cFluor®BY750, cFluor®BY781, cFluor®B250, cFluor®R659, cFluor®R668, cFluor®R685, cFluor®R720, cFluor®R780, cFluor®R840, cFluor®v420, cFluor®v547, cFluor®v450, cFluor®v610 and cFluor®YG610;
wherein the one or more labels is a chemiluminescent label such as a label selected from the group consisting of luminol, isoluminol, theromatic acridinium ester, imidazole, acridinium salt and oxalate ester;
wherein the one or more labels is a bioluminescent label such as a label selected from the group consisting of luciferin, luciferase and aequorin;
wherein the one or more labels is an enzyme label, such as an enzyme label selected from the group peroxidases, malate dehydrogenase, staphylococcal nuclease, delta-5-steroid isomerase, yeast alcohol dehydrogenase, alpha-glycerophosphate, dehydrogenase, triose phosphate isomerase, horseradish peroxidase, alkaline phosphatase, asparaginase, glucose oxidase, beta-galactosidase, ribonuclease, urease, catalase, glucose-6-phosphate dehydrogenase, glucoamylase and acetylcholinesterase;
wherein the one or more labels is a chromophore label;
wherein the one or more labels is a metal label; or
wherein the one or more labels is a radioactive label such as a label selected from the group consisting of a radionuclide, an isotope, a label comprising α rays, a label comprising β rays or a label comprising γ rays.

160-224. (canceled)

225. The peptide-major histocompatibility complex (NMC)/peptide multimer of claim 158, further defined as comprising at least one of:
at least 2, 3, 4, 5, 6, 7, 8, 9, 10, 20, 30, 40, 50, 100 or 1000 MHC/peptide multimers;
at least two different MHC/peptide multimers, such as at least 2, 3, 4, 5, 6, 7, 8, 9, 10, 15, 20, 25, 50, 100, 500 or 1000 different MHC/peptide multimers; or
at least 2, 3, 4, 5, 6, 7, 8, 9, 10, 20, 30, 40, 50, 100 or 1000 MHC/peptide multimers of the composition are different each comprising one or more peptides selected from one or more of the following groups:
i) one or more peptides derived from SARS-CoV-2 B.1.1.7, such as one or more SARS-CoV-2 B.1.1.7 derived peptides set forth in Tables 1 to 10 (SEQ ID NOS: 1 to 3522), such as one or more peptides set forth in Table 1, such as one or more peptides set forth in Table 2, such as one or more peptides set forth in Table 3, such as one or more peptides set forth in Table 4, such as one or more peptides set forth in Table 5, such as one or more peptides set forth in Table 6, such as one or more peptides set forth in Table 7, such as one or more peptides set forth in Table 8, such as one or more peptides set forth in Table 9 and/or such as one or more peptides set forth in Table 10, or any combination thereof,
ii) one or more peptides derived from SARS-CoV-2 B1.351. such as one or more SARS-CoV-2 B1.351 derived peptides set forth in Tables 1 to 10 (SEQ ID NOS: 1 to 3522),
iii) one or more peptides derived from SARS-CoV-2 P.1, such as one or more SARS-CoV-2 P.1 derived peptides set forth in Tables 1 to 10 (SEQ ID NOS: 1 to 3522),
iv) one or more peptides derived from SARS-CoV-2 CAL.20C, such as one or more SARS-CoV-2 CAL.20C derived peptides set forth in Tables 1 to 10 (SEQ ID NOS: 1 to 3522),
v) one or more peptides set forth in Tables 1 to 10 (SEQ ID NOS: 1 to 3522)
vi) one or more peptides derived from the SARS-CoV-2 Spike (S) protein such as one or more SARS-CoV-2 Spike (S) protein derived peptides set forth in Tables 1 to 10 (SEQ ID NOS: 1 to 3522),
vii) one or more peptides derived from the SARS-CoV-2 Membrane (M) protein such as one or more SARS-CoV-2 Membrane (M) protein derived peptides set forth in Tables 1 to 10 (SEQ ID NOS: 1 to 3522),
viii) one or more peptides derived from the SARS-CoV-2 Nucleocapsid (N) protein such as one or more SARS-CoV-2 Nucleocapsid (N) protein derived peptides set forth in Tables 1 to 10 (SEQ ID NOS: 1 to 3522),
ix) one or more peptides derived from the SARS-CoV-2 Envelope (E) protein such as one or more SARS-CoV-2 Envelope (E) protein derived peptides set forth in Tables 1 to 10 (SEQ ID NOS: 1 to 3522),
x) one or more peptides derived from the SARS-CoV-2 ORF3a protein such as one or more SARS-CoV-2 ORF3a protein derived peptides set forth in Tables 1 to 10 (SEQ ID NOS: 1 to 3522),
xi) one or more peptides derived from the SARS-CoV-2 ORF6 protein such as one or more SARS-CoV-2 ORF6 protein derived peptides set forth in Tables 1 to 10 (SEQ ID NOS: 1 to 3522),
xii) one or more peptides derived from the SARS-CoV-2 ORF7a protein such as one or more SARS-CoV-2 ORF7a protein derived peptides set forth in Tables 1 to 10 (SEQ ID NOS: 1 to 3522),
xiii) one or more peptides derived from the SARS-CoV-2 ORF7b protein such as one or more SARS-CoV-2 ORF7b protein derived peptides set forth in Tables 1 to 10 (SEQ ID NOS: 1 to 3522),
xiv) one or more peptides derived from the SARS-CoV-2 ORF8 protein such as one or more SARS-CoV-2 ORF8 protein derived peptides set forth in Tables 1 to 10 (SEQ ID NOS: 1 to 3522),
xv) one or more peptides derived from the SARS-CoV-2 ORF10 protein such as one or more SARS-CoV-2 ORF10 protein derived peptides set forth in Tables 1 to 10 (SEQ ID NOS: 1 to 3522),
xvi) one or more peptides derived from the SARS-CoV-2 nsp1 protein such as one or more SARS-CoV-2 nsp1 protein derived peptides Tables 1 to 10 (SEQ ID NOS: 1 to 3522),
xvii) one or more peptides derived from the SARS-CoV-2 nsp2 protein such as one or more SARS-CoV-2 nsp2 protein derived peptides set forth in Tables 1 to 10 (SEQ ID NOS: 1 to 3522),
xviii) one or more peptides derived from the SARS-CoV-2 nsp3 protein such as one or more SARS-CoV-2 nsp3 protein derived peptides set forth in Tables 1 to 10 (SEQ ID NOS: 1 to 3522),
xix) one or more peptides derived from the SARS-CoV-2 nsp4 protein such as one or more SARS-CoV-2 nsp4 protein derived peptides set forth in Tables 1 to 10 (SEQ ID NOS: 1 to 3522),
xx) one or more peptides derived from the SARS-CoV-2 nsp5 protein such as one or more SARS-CoV-2 nsp5 protein derived peptides set forth in Tables 1 to 10 (SEQ ID NOS: 1 to 3522),
xxi) one or more peptides derived from the SARS-CoV-2 nsp6 protein such as one or more SARS-CoV-2 nsp6 protein derived peptides set forth in Tables 1 to 10 (SEQ ID NOS: 1 to 3522),
xxii) one or more peptides derived from the SARS-CoV-2 nsp7 protein such as one or more SARS-CoV-2 nsp7 protein derived peptides set forth in Tables 1 to 10 (SEQ ID NOS: 1 to 3522),
xxiii) one or more peptides derived from the SARS-CoV-2 nsp8 protein such as one or more SARS-CoV-2 nsp8 protein derived peptides set forth in Tables 1 to 10 (SEQ ID NOS: 1 to 3522),
xxiv) one or more peptides derived from the SARS-CoV-2 nsp9 protein such as one or more SARS-CoV-2 nsp9 protein derived peptides set forth in Tables 1 to 10 (SEQ ID NOS: 1 to 3522),
xxv) one or more peptides derived from the SARS-CoV-2 nsp10 protein such as one or more SARS-CoV-2 nsp10 protein derived peptide set forth in Tables 1 to 10 (SEQ ID NOS: 1 to 3522),
xxvi) one or more peptides derived from the SARS-CoV-2 nsp12 protein such as one or more SARS-CoV-2 nsp12 protein derived peptides set forth in Tables 1 to 10 (SEQ ID NOS: 1 to 3522),
xxvii) one or more peptides derived from the SARS-CoV-2 nsp13 protein such as one or more SARS-CoV-2 nsp13 protein derived peptides set forth in Tables 1 to 10 (SEQ ID NOS: 1 to 3522),
xxviii) one or more peptides derived from the SARS-CoV-2 nsp14 protein such as one or more SARS-CoV-2 nsp14 protein derived peptides set forth in Tables 1 to 10 (SEQ ID NOS: 1 to 3522),
xxix) one or more peptides derived from the SARS-CoV-2 nsp15 protein such as one or more SARS-CoV-2 nsp15 protein derived peptides set forth in Tables 1 to 10 (SEQ ID NOS: 1 to 3522), and
xxx) one or more peptides derived from the SARS-CoV-2 nsp16 protein such as one or more SARS-CoV-2 nsp16 protein derived peptides set forth in Tables 1 to 10 (SEQ ID NOS: 1 to 3522).

226.-227. (canceled)

228. The method of claim 225, further comprising monitoring an immune response relevant to a coronavirus infection comprising one or more steps of:
i) providing one or more MHC/peptide monomers or multimers,
ii) providing a sample comprising a population of T cells, and
iii) measuring the presence, frequency, number, activity and/or state of T cells specific for said one or more MHC/peptide multimers,
thereby monitoring said immune response relevant to a coronavirus infection; or
i) providing one or more MHC/peptide monomers or multimers,
ii) providing a sample comprising a population of T cells, and
iii) measuring the presence, frequency, number, activity and/or state of T cells specific for said one or more MHC/peptide multimers,
thereby diagnosing said coronavirus infection.

229. (canceled)

230. A method for isolation of one or more antigen-specific T cells, said method comprising one or more steps of:
i) providing a sample comprising a population of T cells,
ii) providing one or more MHC/peptide multimers,
iii) contacting said MHC/peptide multimers or composition with said sample comprising a population of T cells, and
iv) isolating T cells specific for said MHC/peptide multimers or composition.

231. The method of claim 230, further comprising detecting an antigen-specific T cell response comprising one or more steps of:
i) providing a sample comprising a population of T cells,
ii) providing one or more MHC/peptide multimers,
iii) contacting said MHC/peptide multimers or composition with said sample, and
iv) measuring the presence, frequency, number, activity and/or state of T cells specific for said MHC/peptide multimers or composition, thereby detecting said antigen-specific T cell response.

232. The method of claim 230, further comprising distinguishing an immune response from a subject that has been: a) vaccinated against but not exposed to SARS-COV-2, b) exposed to SARS-COV-2 but not vaccinated against SARS-COV-2, c) vaccinated against and exposed to SARS-COV-2, or d) neither vaccinated against nor exposed to SARS-COV-2, the method comprising, consisting of, or consisting essentially of:
contacting a biological sample from a subject with one or more monomers or multimers selected from any one of SEQ ID NOS: 1 to 3522; and
determining if the composition elicits an immune response from the contacted cells, wherein the level of elicited immune response indicates whether the subject falls into category a), b), c), or d); or
determining whether the subject falls into category a), b), c), or d) further comprises determining whether the immune response is predominantly to a SARS-CoV-2 Spike protein, or is to one or more SARS-CoV-2antigens other than the Spike protein, wherein at least one of:
i) a predominant response to SARS-CoV-2 Spike protein and minimal response to one or more SARS-CoV-2 antigens other than Spike is indicative that a subject falls into category a),
ii) a response to coronavirus Spike protein and one or more SARS-CoV-2 antigens other than Spike is indicative that the subject falls into category b),
iii) a strong response to SARS-CoV-2 Spike protein and one or more SARS-CoV-2 antigens other than Spike is indicative that the subject falls into category c), and
iv) a weak or no response to SARS-CoV-2 Spike or one or more SARS-CoV-2 antigens other than Spike is indicative that the subject falls into category d);
wherein the SARS-CoV-2 Spike protein or SARS-CoV-2 antigen is a protein or peptide comprising an amino acid sequence set forth in Tables 1 to 10 (SEQ ID NOS: 1 to 3522);
wherein the sample comprises T cells;
wherein the response comprises inducing, increasing, promoting or stimulating anti-SARS-CoV-2 activity of T cells;
wherein the T cells are CD8+ or CD4+ T cells;
wherein the method comprises determining whether the subject has been infected by or exposed to SARS-CoV-2 more than once by determining if the subject elicits a secondary T cell immune response profile that is different from a primary T cell immune response profile;
further comprising diagnosing a SARS-CoV-2 infection or exposure in a subject, the method comprising contacting a biological sample from a subject with a composition; and determining if the composition elicits a T cell immune response, wherein the T cell immune response identifies that the subject has been infected with or exposed to SARS-CoV-2; or
wherein the method is conducted three or more days following the date of suspected infection by or exposure to a coronavirus.

233.-240. (canceled)
